(19) United States
(12) Patent Application Publication
(10) Pub. No.: US 2024/0368619 A1
(43) Pub. Date: Nov. 7, 2024

(54) METHODS AND COMPOSITIONS FOR PPO HERBICIDE TOLERANCE

(71) Applicants: SESVanderHave NV, Tienen (BE); DLF Seeds, Roskilde (DK)

(72) Inventors: Hilde Maurice Anne VAN HOUTTE, Herent (BE); Shivegowda Shikaranahalli THAMMANNAGOWDA, Kessel-Lo (BE); Murielle Anne Francoise LOMMEL, Itterbeek (BE); Glenda WILLEMS, Beauvechain (BE); Per Erik SNELL, Landskrona (SE); Ingo Peter LENK, Roskilde (DK); Elisabeth Rosine Armand VEECKMAN, Destelbergen (BE)

(21) Appl. No.: 18/688,167

(22) PCT Filed: Sep. 2, 2022
(86) PCT No.: PCT/IB2022/058290

§ 371 Date: Feb. 29, 2024

Related U.S. Application Data
(60) Provisional application No. 63/240,271, filed on Sep. 2, 2021.

(51) Int. Cl. C12N 15/82; C12N 9/02; C12N 9/22; C12N 15/11

(52) U.S. Cl. CPC C12N 15/8274; C12N 9/001; C12N 9/22; C12N 15/111; C12N 15/8213; C12N 2310/20; C12Y 103/03004

(57) ABSTRACT

The present disclosure relates to Beta vulgaris plants having resistance to PPO herbicides and methods of producing said plants by targeted genome editing. The disclosure further relates to genetic sequences for use with targeted genome editing technologies and/or genotyping, and herbicide-resistant PPO proteins produced from genetically engineered, non-transgenic Beta vulgaris plants.

### CROSS-REFERENCE TO RELATED APPLICATIONS

[0001] This application claims the benefit of U.S. Provisional Application No. 63/240,271 filed on Sep. 2, 2021, which is hereby incorporated by reference in its entirety for all purposes.

### FIELD

[0002] The present disclosure relates to the fields of agriculture, plant biotechnology, and molecular biology. More specifically, the disclosure relates to plants and methods of producing said plants which are tolerant to herbicides that inhibit protoporphyrinogen oxidase and methods of use thereof.

### REFERENCE TO AN ELECTRONIC SEQUENCE LISTING

[0003] The contents of the electronic sequence listing (SESV_001_01WO_SeqList_ST26.xml; Size: 1,038,631 bytes; and Date of Creation: Aug. 31, 2022) is herein incorporated by reference in its entirety.

### BACKGROUND

[0004] With the increase of weed species resistant to the commonly used herbicides like glyphosate, new herbicide tolerance traits are needed in the field. Herbicides of particular interest include herbicides that inhibit protoporphyrinogen oxidase (PPO, EC 1.3.3.4), referred to as PPO herbicides. PPO herbicides provide control of a spectrum of herbicide-resistant weeds, thus making a trait conferring tolerance to these herbicides particularly useful in a cropping system. Thus, there is a need for crops having resistance to PPO herbicides. Also needed are methods for making such crops and controlling weed growth in the vicinity of such crops.

### SUMMARY OF THE DISCLOSURE

[0005] The disclosure teaches a method of producing a Beta vulgaris plant with increased tolerance to an herbicide that inhibits protoporphyrinogen oxidase comprising the steps of: a) transfecting a protoplast obtained from Beta vulgaris cells with a genome editing system to generate a transfected protoplast, wherein the genome editing system comprises: i) a Cas enzyme;
[0006] ii) at least one guide RNA (gRNA), wherein the at least one gRNA targets a genomic region corresponding to between position 3653 and 3698 of SEQ ID NO: 1; and iii) at least one single-stranded donor DNA repair template designed to introduce a substitution of arginine at a position corresponding to 126 of SEQ ID NO: 3; b) exposing the transfected protoplast to a selective pressure of at least one herbicide that inhibits protoporphyrinogen oxidase; c) selecting a protoplast comprising a substitution of arginine at a position corresponding to 126 of SEQ ID NO: 3; and d) regenerating a plant from said selected protoplast to produce a Beta vulgaris plant with increased tolerance to an herbicide that inhibits protoporphyrinogen oxidase.

[0007] The disclosure relates to a Beta vulgaris plant, or part thereof, comprising an engineered nucleic acid encoding a protoporphyrinogen oxidase 2 (PPO2) amino acid sequence, wherein said PPO2 amino acid sequence comprises a substitution of arginine at a position corresponding to 126 of SEQ ID NO: 3.

[0008] The disclosure further relates to a polynucleotide comprising an engineered nucleic acid sequence encoding a protein comprising an amino acid substitution at a position corresponding to 126 of SEQ ID NO: 3, wherein the substitution is selected from the group consisting of: R126A, R126G, R126L, R126I, and R126M.

[0009] The disclosure further teaches methods for producing a plant, plant part, or plant cell having resistance or tolerance to a PPO herbicide, the method comprising: transforming a plant, plant part, or plant cell with a guide RNA and/or a donor template disclosed herein.

[0010] The disclosure further teaches methods for producing a Beta vulgaris plant or plant cell having an engineered PPO2 protein comprising: a) providing a guide RNA sequence selected from SEQ ID NOs: 67-80; b) providing a donor template sequence selected from SEQ ID NOs: 48-66, and 90-96; c) providing a DNA nuclease; wherein said guide RNA, donor template, and DNA endonuclease are provided on one or more plasmids, or wherein said guide RNA and said DNA nuclease are provided as a ribonucleoprotein; d) transforming the Beta vulgaris plant or plant cell with said guide RNA, donor template, and DNA nuclease; and e) selecting a plant or plant cell having an amino acid substitution corresponding to position number 126 of SEQ ID NO: 3.

[0011] The disclosure further relates to plants produced by the methods disclosed herein, and methods of using the plants for controlling undesired vegetation at a Beta vulgaris cultivation site.

[0012] The disclosure further relates to a guide RNA suitable for use in a CRISPR based genome editing system, wherein said guide RNA is selected from SEQ ID NOs: 67-80.

[0013] The disclosure further relates to a donor template sequence suitable for use in a CRISPR based genome editing system, wherein said donor template sequence is selected from SEQ ID NOs: 48-66, and 90-96.

[0014] The disclosure further relates to DNA constructs comprising the guide RNAs and donor templates disclosed herein.

[0015] The disclosure further relates to an engineered PPO2 protein comprising an amino acid substitution corresponding to position number 126 in SEQ ID NO: 3.

### BRIEF DESCRIPTION OF THE DRAWINGS

[0016] FIG. 1 shows the location of genetic edits in a consensus amino acid sequence for sugar beet gene PPO2 which can confer resistance to PPO herbicides.

[0017] FIG. 2 is a protein alignment produced by Clustal Omega showing the location of various edits (shaded, bold and underlined font) in SEQ ID NOs: 6, 9, 12, 15, 18, 21, 24, 27, 30, 33, 37, 40, and 43 compared to wildtype SEQ ID NO: 3.

[0018] FIG. 3 shows two Sanger sequencing chromatograms obtained on DNA extracted from leaf samples of edited sugar beet plant HTC018. Sequence and chromatogram of the edited sample is shown on top, while the sequence of the control sample is shown on the bottom. The box indicates the exact position of the triplet that has been mutated (AGA in the control, AGA/TTA in the edited sample).

[0019] FIGS. 4A-4D are photographs showing the growth of sugar beet plants carrying the R126L mutation (FIG. 4A HTC013 and FIG. 4B is HTC015) versus wild-type (FIG. 4C and FIG. 4D) on media containing SAF 2.5 μM for 20 days.

[0020] FIGS. 5A-5B are photographs of sugar beet plants with the expected substitution at position 126 vs others, 17 days after spraying with Evolution, Treevix, or water. FIG. 5A shows differences in response between edited plants and wildtype plants (Ctrl) 17 days after spray with Evolution 0.2×. FIG. 5B shows the phytotoxicity effect of Treevix 1× on an elite sugar beet wildtype genotype, compared to the edited sugar beet plant HTC046 having R126L.

### BRIEF DESCRIPTION OF THE SEQUENCE LISTING

TABLE 1
Brief description of the sequence listing

| SEQ | Seq. | | | | | | | | | | | | Cas9 or | | |
|---|---|---|---|---|---|---|---|---|---|---|---|---|---|---|---|
| ID NO. | Type | Brief Description | Site 1 | Site 2 | OC1 | OC2 | CC1 | CC2 | AA1 | AA2 | Sil Mut OS | Sil Mut CS | Cpf1 | Lgth | +/− |
| 1 | gDNA | Genomic DNA (gDNA) | wt | wt | n.a. | n.a. | n.a. | n.a. | n.a. | n.a. | n.a. | n.a. | n.a. | 37009 | + |
| | | sequence of wild type | | | | | | | | | | | | | |
| | | Beta vulgaris PPO2 | | | | | | | | | | | | | |
| 2 | CDS | cDNA sequence of wild | wt | wt | n.a. | n.a. | n.a. | n.a. | n.a. | n.a. | n.a. | n.a. | n.a. | 1575 | + |
| | | type Beta vulgaris PPO2 | | | | | | | | | | | | | |
| 3 | protein | Protein sequence of wild | wt | wt | n.a. | n.a. | n.a. | n.a. | n.a. | n.a. | n.a. | n.a. | n.a. | 524 | + |
| | | type Beta vulgaris PPO2 | | | | | | | | | | | | | |
| 4 | gDNA | Genomic DNA (gDNA) | G208/ | n.a. | GGA | n.a. | — | n.a. | — | n.a. | n.a. | n.a. | Either | 37006 | + |
| | | sequence of dG209 | G209 | | | | | | | | | | | | |
| | | mutant of Beta vulgaris | | | | | | | | | | | | | |
| | | PPO2 | | | | | | | | | | | | | |
| 5 | CDS | cDNA sequence of dG209 | G208/ | n.a. | GGA | n.a. | — | n.a. | — | n.a. | n.a. | n.a. | Either | 1572 | + |
| | | mutant of Beta vulgaris | G209 | | | | | | | | | | | | |
| | | PPO2 | | | | | | | | | | | | | |
| 6 | protein | Protein sequence of | G208/ | n.a. | G | n.a. | n.a. | n.a. | — | n.a. | n.a. | n.a. | Either | 523 | + |
| | | dG209 mutant of Beta | G209 | | | | | | | | | | | | |
| | | vulgaris PPO2 | | | | | | | | | | | | | |
| 7 | gDNA | Genomic DNA (gDNA) | R126 | n.a. | AGA | n.a. | GCN | n.a. | A | n.a. | n.a. | n.a. | Cpf1 | 37009 | + |
| | | sequence of R126A | | | | | | | | | | | | | |
| | | mutant of Beta vulgaris | | | | | | | | | | | | | |
| | | PPO2 | | | | | | | | | | | | | |
| 8 | CDS | cDNA sequence of | R126 | n.a. | AGA | n.a. | GCN | n.a. | A | n.a. | n.a. | n.a. | Cpf1 | 1575 | + |
| | | R126A mutant of Beta | | | | | | | | | | | | | |
| | | vulgaris PPO2 | | | | | | | | | | | | | |
| 9 | protein | Protein sequence of | R126 | n.a. | R | n.a. | n.a. | n.a. | A | n.a. | n.a. | n.a. | Cpf1 | 524 | + |
| | | R126A mutant of Beta | | | | | | | | | | | | | |
| | | vulgaris PPO2 | | | | | | | | | | | | | |
| 10 | gDNA | Genomic DNA (gDNA) | R126 | n.a. | AGA | n.a. | GGN | n.a. | G | n.a. | n.a. | n.a. | Cpf1 | 37009 | + |
| | | sequence of R126G | | | | | | | | | | | | | |
| | | mutant of Beta vulgaris | | | | | | | | | | | | | |
| | | PPO2 | | | | | | | | | | | | | |
| 11 | CDS | cDNA sequence of | R126 | n.a. | AGA | n.a. | GGN | n.a. | G | n.a. | n.a. | n.a. | Cpf1 | 1575 | + |
| | | R126G mutant of Beta | | | | | | | | | | | | | |
| | | vulgaris PPO2 | | | | | | | | | | | | | |
| 12 | protein | Protein sequence of | R126 | n.a. | R | n.a. | n.a. | n.a. | G | n.a. | n.a. | n.a. | Cpf1 | 524 | + |
| | | R126G mutant of Beta | | | | | | | | | | | | | |
| | | vulgaris PPO2 | | | | | | | | | | | | | |
| 13 | gDNA | Genomic DNA (gDNA) | R126 | n.a. | AGA | n.a. | CTN | n.a. | L | n.a. | n.a. | n.a. | Either | 37009 | + |
| | | sequence of R126L | | | | | | | | | | | | | |
| | | mutant of Beta vulgaris | | | | | | | | | | | | | |
| | | PPO2 | | | | | | | | | | | | | |
| 14 | CDS | cDNA sequence of | R126 | n.a. | AGA | n.a. | CTN | n.a. | L | n.a. | n.a. | n.a. | Either | 1575 | + |
| | | R126L mutant of Beta | | | | | | | | | | | | | |
| | | vulgaris PPO2 | | | | | | | | | | | | | |
| 15 | protein | Protein sequence of | R126 | n.a. | R | n.a. | n.a. | n.a. | L | n.a. | n.a. | n.a. | Either | 524 | + |
| | | R126L mutant of Beta | | | | | | | | | | | | | |
| | | vulgaris PPO2 | | | | | | | | | | | | | |
| 16 | gDNA | Genomic DNA (gDNA) | R126 | n.a. | AGA | n.a. | ATH | n.a. | I | n.a. | n.a. | n.a. | Cpf1 | 37009 | + |
| | | sequence of R126I mutant | | | | | | | | | | | | | |
| | | of Beta vulgaris PPO2 | | | | | | | | | | | | | |
| 17 | CDS | cDNA sequence of R126I | R126 | n.a. | AGA | n.a. | ATH | n.a. | I | n.a. | n.a. | n.a. | Cpf1 | 1575 | + |
| | | mutant of Beta vulgaris | | | | | | | | | | | | | |
| | | PPO2 | | | | | | | | | | | | | |
| 18 | protein | Protein sequence of | R126 | n.a. | R | n.a. | n.a. | n.a. | I | n.a. | n.a. | n.a. | Cpf1 | 524 | + |
| | | R126I mutant of Beta | | | | | | | | | | | | | |
| | | vulgaris PPO2 | | | | | | | | | | | | | |
| 19 | gDNA | Genomic DNA (gDNA) | R126 | n.a. | AGA | n.a. | ATG | n.a. | M | n.a. | n.a. | n.a. | Cpf1 | 37009 | + |
| | | sequence of R126M | | | | | | | | | | | | | |
| | | mutant of Beta vulgaris | | | | | | | | | | | | | |
| | | PPO2 | | | | | | | | | | | | | |
| 20 | CDS | cDNA sequence of | R126 | n.a. | AGA | n.a. | ATG | n.a. | M | n.a. | n.a. | n.a. | Cpf1 | 1575 | + |
| | | R126M mutant of Beta | | | | | | | | | | | | | |
| | | vulgaris PPO2 | | | | | | | | | | | | | |
| 21 | protein | Protein sequence of | R126 | n.a. | R | n.a. | n.a. | n.a. | M | n.a. | n.a. | n.a. | Cpf1 | 524 | + |
| | | R126M mutant of Beta | | | | | | | | | | | | | |
| | | vulgaris PPO2 | | | | | | | | | | | | | |
| 22 | gDNA | Genomic DNA (gDNA) | F420 | n.a. | TTT | n.a. | GTN | n.a. | V | n.a. | n.a. | n.a. | Cpf1 | 37009 | + |
| | | sequence of F420V | | | | | | | | | | | | | |
| | | mutant of Beta vulgaris | | | | | | | | | | | | | |
| | | PPO2 | | | | | | | | | | | | | |
| 23 | CDS | cDNA sequence of | F420 | n.a. | TTT | n.a. | GTN | n.a. | V | n.a. | n.a. | n.a. | Cpf1 | 1575 | + |
| | | F420V mutant of Beta | | | | | | | | | | | | | |
| | | vulgaris PPO2 | | | | | | | | | | | | | |
| 24 | protein | Protein sequence of | F420 | n.a. | F | n.a. | n.a. | n.a. | V | n.a. | n.a. | n.a. | Cpf1 | 524 | + |
| | | F420V mutant of Beta | | | | | | | | | | | | | |
| | | vulgaris PPO2 | | | | | | | | | | | | | |
| 25 | gDNA | Genomic DNA (gDNA) | F420 | n.a. | TTT | n.a. | ATG | n.a. | M | n.a. | n.a. | n.a. | Cpf1 | 37009 | + |
| | | sequence of F420M | | | | | | | | | | | | | |
| | | mutant of Beta vulgaris | | | | | | | | | | | | | |
| | | PPO2 | | | | | | | | | | | | | |
| 26 | CDS | cDNA sequence of | F420 | n.a. | TTT | n.a. | ATG | n.a. | M | n.a. | n.a. | n.a. | Cpf1 | 1575 | + |
| | | F420M mutant of Beta | | | | | | | | | | | | | |
| | | vulgaris PPO2 | | | | | | | | | | | | | |
| 27 | protein | Protein sequence of | F420 | n.a. | F | n.a. | n.a. | n.a. | M | n.a. | n.a. | n.a. | Cpf1 | 524 | + |
| | | F420M mutant of Beta | | | | | | | | | | | | | |
| | | vulgaris PPO2 | | | | | | | | | | | | | |
| 28 | gDNA | Genomic DNA (gDNA) | F420 | n.a. | TTT | n.a. | ATH | n.a. | I | n.a. | n.a. | n.a. | Cpf1 | 37009 | + |
| | | sequence of F420I mutant | | | | | | | | | | | | | |
| | | of Beta vulgaris PPO2 | | | | | | | | | | | | | |
| 29 | CDS | cDNA sequence of F420I | F420 | n.a. | TTT | n.a. | ATH | n.a. | I | n.a. | n.a. | n.a. | Cpf1 | 1575 | + |
| | | mutant of Beta vulgaris | | | | | | | | | | | | | |
| | | PPO2 | | | | | | | | | | | | | |
| 30 | protein | Protein sequence of F420I | F420 | n.a. | F | n.a. | n.a. | n.a. | I | n.a. | n.a. | n.a. | Cpf1 | 524 | + |
| | | mutant of Beta vulgaris | | | | | | | | | | | | | |
| | | PPO2 | | | | | | | | | | | | | |
| 31 | gDNA | Genomic DNA (gDNA) | F420 | n.a. | TTT | n.a. | CTN | n.a. | L | n.a. | n.a. | n.a. | Cpf1 | 37009 | + |
| | | sequence of F420L | | | | | | | | | | | | | |
| | | mutant of Beta vulgaris | | | | | | | | | | | | | |
| | | PPO2 | | | | | | | | | | | | | |
| 32 | CDS | cDNA sequence of F420L | F420 | n.a. | TTT | n.a. | CTN | n.a. | L | n.a. | n.a. | n.a. | Cpf1 | 1575 | + |
| | | mutant of Beta vulgaris | | | | | | | | | | | | | |
| | | PPO2 | | | | | | | | | | | | | |
| 33 | protein | Protein sequence of | F420 | n.a. | F | n.a. | n.a. | n.a. | L | n.a. | n.a. | n.a. | Cpf1 | 524 | + |
| | | F420L mutant of Beta | | | | | | | | | | | | | |
| | | vulgaris PPO2 | | | | | | | | | | | | | |
| 34 | CDS | CDS for codon optimized | n.a. | n.a. | n.a. | n.a. | n.a. | n.a. | n.a. | n.a. | n.a. | n.a. | Cpf1 | 4272 | + |
| | | Cpf1 | | | | | | | | | | | | | |
| 35 | gDNA | Genomic DNA (gDNA) | L397 | n.a. | CTC | n.a. | GAR | n.a. | E | n.a. | n.a. | n.a. | Cas9 | 37009 | + |
| | | sequence of L397E | | | | | | | | | | | | | |
| | | mutant of Beta vulgaris | | | | | | | | | | | | | |
| | | PPO2 | | | | | | | | | | | | | |
| 36 | CDS | cDNA sequence of L397E | L397 | n.a. | CTC | n.a. | GAR | n.a. | E | n.a. | n.a. | n.a. | Cas9 | 1575 | + |
| | | mutant of Beta vulgaris | | | | | | | | | | | | | |
| | | PPO2 | | | | | | | | | | | | | |
| 37 | protein | Protein sequence of | L397 | n.a. | L | n.a. | n.a. | n.a. | E | n.a. | n.a. | n.a. | Cas9 | 524 | + |
| | | L397E mutant of Beta | | | | | | | | | | | | | |
| | | vulgaris PPO2 | | | | | | | | | | | | | |
| 38 | gDNA | Genomic DNA (gDNA) | G398 | n.a. | GGT | n.a. | GCT | n.a. | A | n.a. | n.a. | n.a. | Cas9 | 37009 | + |
| | | sequence of G398A | | | | | | | | | | | | | |
| | | mutant of Beta vulgaris | | | | | | | | | | | | | |
| | | PPO2 | | | | | | | | | | | | | |
| 39 | CDS | cDNA sequence of | G398 | n.a. | GGT | n.a. | GCT | n.a. | A | n.a. | n.a. | n.a. | Cas9 | 1575 | + |
| | | G398A mutant of Beta | | | | | | | | | | | | | |
| | | vulgaris PPO2 | | | | | | | | | | | | | |
| 40 | protein | Protein sequence of | G398 | n.a. | G | n.a. | n.a. | n.a. | A | n.a. | n.a. | n.a. | Cas9 | 524 | + |
| | | G398A mutant of Beta | | | | | | | | | | | | | |
| | | vulgaris PPO2 | | | | | | | | | | | | | |
| 41 | gDNA | Genomic DNA (gDNA) | L397 | F420 | CTC | TTT | GAR | GTN | E | V | n.a. | n.a. | Cas9 | 37009 | + |
| | | sequence of | | | | | | | | | | | | | |
| | | L397E + F420V double | | | | | | | | | | | | | |
| | | mutant of Beta vulgaris | | | | | | | | | | | | | |
| | | PPO2 | | | | | | | | | | | | | |
| 42 | CDS | cDNA sequence of | L397 | F420 | CTC | TTT | GAR | GTN | E | V | n.a. | n.a. | Cas9 | 1575 | + |
| | | L397E + F420V double | | | | | | | | | | | | | |
| | | mutant of Beta vulgaris | | | | | | | | | | | | | |
| | | PPO2 | | | | | | | | | | | | | |
| 43 | protein | Protein sequence of | L397 | F420 | L | F | n.a. | n.a. | E | V | n.a. | n.a. | Cas9 | 524 | + |
| | | L397E + F420V double | | | | | | | | | | | | | |
| | | mutant of Beta vulgaris | | | | | | | | | | | | | |
| | | PPO2 | | | | | | | | | | | | | |
| 44 | gDNA | Genomic DNA (gDNA) | R126 | n.a. | AGA | n.a. | TTR | n.a. | L | n.a. | n.a. | n.a. | Either | 37009 | + |
| | | sequence of R126L | | | | | | | | | | | | | |
| | | mutant of Beta vulgaris | | | | | | | | | | | | | |
| | | PPO2 | | | | | | | | | | | | | |
| 45 | CDS | cDNA sequence of | R126 | n.a. | AGA | n.a. | TTR | n.a. | L | n.a. | n.a. | n.a. | Either | 1575 | + |
| | | R126L mutant of Beta | | | | | | | | | | | | | |
| | | vulgaris PPO2 | | | | | | | | | | | | | |
| 46 | gDNA | Genomic DNA (gDNA) | F420 | n.a. | TTT | n.a. | TTR | n.a. | L | n.a. | n.a. | n.a. | Cpf1 | 37009 | + |
| | | sequence of F420L | | | | | | | | | | | | | |
| | | mutant of Beta vulgaris | | | | | | | | | | | | | |
| | | PPO2 | | | | | | | | | | | | | |
| 47 | CDS | cDNA sequence of F420L | F420 | n.a. | TTT | n.a. | TTR | n.a. | L | n.a. | n.a. | n.a. | Cpf1 | 1575 | + |
| | | mutant of Beta vulgaris | | | | | | | | | | | | | |
| | | PPO2 | | | | | | | | | | | | | |
| 48 | donor | Donor template for | F420 | n.a. | TTT | n.a. | ATG | n.a. | M | n.a. | n.a. | n.a. | Cpf1 | 251 | − |
| | | F420M | | | | | | | | | | | | | |
| 49 | donor | Donor template for | F420 | n.a. | TTT | n.a. | ATH | n.a. | I | n.a. | n.a. | n.a. | Cpf1 | 251 | − |
| | | F420I | | | | | | | | | | | | | |
| 50 | donor | Donor template for | F420 | n.a. | TTT | n.a. | CTN | n.a. | L | n.a. | n.a. | n.a. | Cpf1 | 251 | − |
| | | F420L | | | | | | | | | | | | | |
| 51 | donor | Donor template for | G208/ | n.a. | GGA | n.a. | — | n.a. | — | n.a. | n.a. | n.a. | Cpf1 | 262 | − |
| | | dG209 | G209 | | | | | | | | | | | | |
| 52 | donor | Donor template for | R126 | n.a. | AGA | n.a. | GCN | n.a. | A | n.a. | n.a. | n.a. | Cpf1 | 335 | − |
| | | R126A | | | | | | | | | | | | | |
| 53 | donor | Donor template for | R126 | n.a. | AGA | n.a. | GGN | n.a. | G | n.a. | n.a. | n.a. | Cpf1 | 335 | − |
| | | R126G | | | | | | | | | | | | | |
| 54 | donor | Donor template for | R126 | n.a. | AGA | n.a. | CTN | n.a. | L | n.a. | n.a. | n.a. | Cpf1 | 335 | − |
| | | R126L | | | | | | | | | | | | | |
| 55 | donor | Donor template for | R126 | n.a. | AGA | n.a. | ATH | n.a. | I | n.a. | n.a. | n.a. | Cpf1 | 335 | − |
| | | R126I | | | | | | | | | | | | | |
| 56 | donor | Donor template for | R126 | n.a. | AGA | n.a. | ATG | n.a. | M | n.a. | n.a. | n.a. | Cpf1 | 335 | − |
| | | R126M | | | | | | | | | | | | | |
| 57 | donor | Donor template for | F420 | n.a. | TTT | n.a. | GTN | n.a. | V | n.a. | n.a. | n.a. | Cpf1 | 251 | − |
| | | F420V | | | | | | | | | | | | | |
| 58 | donor | Donor template for | R126 | n.a. | AGA | n.a. | TTR | n.a. | L | n.a. | n.a. | n.a. | Either | 161 | + |
| | | R126L (for Cas9-Cpf1) | | | | | | | | | | | | | |
| 59 | donor | Donor template for | R126 | n.a. | AGA | n.a. | CTN | n.a. | L | n.a. | n.a. | n.a. | Either | 161 | + |
| | | R126L (for Cas9-Cpf1) | | | | | | | | | | | | | |
| 60 | donor | Donor template for G209 | G208/ | n.a. | GGA | n.a. | — | n.a. | — | n.a. | n.a. | n.a. | Cas9 | 175 | + |
| | | (for Cas9) | G209 | | | | | | | | | | | | |
| 61 | donor | Donor template for | G398 | n.a. | GGT | n.a. | GCN | n.a. | A | n.a. | n.a. | n.a. | Either | 155 | − |
| | | G398A (for Cas9-Cpf1) | | | | | | | | | | | | | |
| 62 | donor | Donor template L397E | L397 | F420 | CTC | TTT | GAR | GTN | E | V | n.a. | n.a. | Cas9 | 200 | + |
| | | and F420V (for Cas9) | | | | | | | | | | | | | |
| 63 | donor | Donor template for G209 | G208/ | n.a. | GGA | n.a. | — | n.a. | — | n.a. | n.a. | n.a. | Cpf1 | 154 | − |
| | | (for Cpf1) | G209 | | | | | | | | | | | | |
| 64 | donor | Donor template for | L397 | F420 | CTC | TTT | GAR | GTN | E | V | n.a. | n.a. | Cpf1 | 200 | − |
| | | L397E and F420V (for | | | | | | | | | | | | | |
| | | Cpf1) | | | | | | | | | | | | | |
| 65 | donor | Donor template for | F420 | n.a. | TTT | n.a. | TTR | n.a. | L | n.a. | n.a. | n.a. | Cpf1 | 251 | − |
| | | F420L | | | | | | | | | | | | | |
| 66 | donor | Donor template for | R126 | n.a. | AGA | n.a. | TTR | n.a. | L | n.a. | n.a. | n.a. | Cpf1 | 335 | − |
| | | R126L | | | | | | | | | | | | | |
| 67 | guide | sgRNA1 for L397E and | L397 | F420 | n.a. | n.a. | n.a. | n.a. | n.a. | n.a. | n.a. | n.a. | Cas9 | 20 | + |
| | | F420V (for Cas9) | | | | | | | | | | | | | |
| 68 | guide | sgRNA2 for L397E and | L397 | F420 | n.a. | n.a. | n.a. | n.a. | n.a. | n.a. | n.a. | n.a. | Cas9 | 20 | + |
| | | F420V (for Cas9) | | | | | | | | | | | | | |
| 69 | guide | sgRNA for R126L (for | R126 | n.a. | n.a. | n.a. | n.a. | n.a. | n.a. | n.a. | n.a. | n.a. | Cpf1 | 20 | − |
| | | Cpf1) | | | | | | | | | | | | | |
| 70 | guide | sgRNA1 for R126 | R126 | n.a. | n.a. | n.a. | n.a. | n.a. | n.a. | n.a. | n.a. | n.a. | Cpf1 | 23 | + |
| 71 | guide | sgRNA for R126L (for | R126 | n.a. | n.a. | n.a. | n.a. | n.a. | n.a. | n.a. | n.a. | n.a. | Cas9 | 20 | + |
| | | Cas9) | | | | | | | | | | | | | |
| 72 | guide | sgRNA for G398A (for | G398 | n.a. | n.a. | n.a. | n.a. | n.a. | n.a. | n.a. | n.a. | n.a. | Cpf1 | 20 | + |
| | | Cpf1) | | | | | | | | | | | | | |
| 73 | guide | sgRNA for L397E and | L397 | F420 | n.a. | n.a. | n.a. | n.a. | n.a. | n.a. | n.a. | n.a. | Cpf1 | 20 | + |
| | | F420V (for Cpf1) | | | | | | | | | | | | | |
| 74 | guide | sgRNA2 for R126 | R126 | n.a. | n.a. | n.a. | n.a. | n.a. | n.a. | n.a. | n.a. | n.a. | Cpf1 | 23 | + |
| 75 | guide | sgRNA1 for G209 | G208/ | n.a. | n.a. | n.a. | n.a. | n.a. | n.a. | n.a. | n.a. | n.a. | Cpf1 | 23 | + |
| | | | G209 | | | | | | | | | | | | |
| 76 | guide | sgRNA2 for G209 | G208/ | n.a. | n.a. | n.a. | n.a. | n.a. | n.a. | n.a. | n.a. | n.a. | Cpf1 | 23 | + |
| | | | G209 | | | | | | | | | | | | |
| 77 | guide | sgRNA1 for F420 | F420 | n.a. | n.a. | n.a. | n.a. | n.a. | n.a. | n.a. | n.a. | n.a. | Cpf1 | 23 | + |
| 78 | guide | sgRNA2 for F420 | F420 | n.a. | n.a. | n.a. | n.a. | n.a. | n.a. | n.a. | n.a. | n.a. | Cpf1 | 23 | + |
| 79 | guide | sgRNA for G209 (for | G208/ | n.a. | n.a. | n.a. | n.a. | n.a. | n.a. | n.a. | n.a. | n.a. | Cas9 | 20 | − |
| | | Cas9) | G209 | | | | | | | | | | | | |
| 80 | guide | sgRNA for G398A (for | G398 | n.a. | n.a. | n.a. | n.a. | n.a. | n.a. | n.a. | n.a. | n.a. | Cas9 | 20 | − |
| | | Cas9) | | | | | | | | | | | | | |
| 81 | primer | KASP marker primer | R126 | n.a. | n.a. | n.a. | n.a. | n.a. | n.a. | n.a. | n.a. | n.a. | n.a. | 41 | |
| | | alleleX S01/S02 | | | | | | | | | | | | | |
| 82 | primer | KASP marker primer | R126 | n.a. | n.a. | n.a. | n.a. | n.a. | n.a. | n.a. | n.a. | n.a. | n.a. | 47 | |
| | | alleleX S03 | | | | | | | | | | | | | |
| 83 | primer | KASP marker primer | R126 | n.a. | n.a. | n.a. | n.a. | n.a. | n.a. | n.a. | n.a. | n.a. | n.a. | 43 | |
| | | alleleY S01/S02 | | | | | | | | | | | | | |
| 84 | primer | KASP marker primer | R126 | n.a. | n.a. | n.a. | n.a. | n.a. | n.a. | n.a. | n.a. | n.a. | n.a. | 49 | |
| | | alleleY S03 | | | | | | | | | | | | | |
| 85 | primer | Sanger forward primer | R126 | n.a. | n.a. | n.a. | n.a. | n.a. | n.a. | n.a. | n.a. | n.a. | n.a. | 29 | |
| 86 | primer | Sanger reverse primer | R126 | n.a. | n.a. | n.a. | n.a. | n.a. | n.a. | n.a. | n.a. | n.a. | n.a. | 28 | |
| 87 | primer | KASP marker primer | R126 | n.a. | n.a. | n.a. | n.a. | n.a. | n.a. | n.a. | n.a. | n.a. | n.a. | 29 | |
| | | common S01 | | | | | | | | | | | | | |
| 88 | primer | KASP marker primer | R126 | n.a. | n.a. | n.a. | n.a. | n.a. | n.a. | n.a. | n.a. | n.a. | n.a. | 30 | |
| | | common S02 | | | | | | | | | | | | | |
| 89 | primer | KASP marker primer | R126 | n.a. | n.a. | n.a. | n.a. | n.a. | n.a. | n.a. | n.a. | n.a. | n.a. | 25 | |
| | | common S03 | | | | | | | | | | | | | |
| 90 | donor | Donor template for G209 | G208/ | n.a. | GGA | n.a. | — | n.a. | — | n.a. | CAGTCT* | CAaTCc* | Cas9 | 175 | + |
| | | with silent mutation (for | G209 | | | | | | | | | | | | |
| | | Cas9) | | | | | | | | | | | | | |
| 91 | donor | Donor template for | G398 | n.a. | GGT | n.a. | GCN | n.a. | A | n.a. | GTTACGAAATCAGGG | aTTgCGgAATCAGcG | Cas9 | 155 | − |
| | | G398A with silent | | | | | | | | | | | | | |
| | | mutation (for Cas9) | | | | | | | | | | | | | |
| 92 | donor | Donor template L397E | L397 | F420 | CTC | TTT | GAR | GTN | E | V | AATTGTCTGGTT . . . GTTGGAGGA | AAcTGcCTcGTT . . . GTcGGcGGA | Cas9 | 200 | + |
| | | and F420V with silent | | | | | | | | | | | | | |
| | | mutation (for Cas9) | | | | | | | | | | | | | |
| 93 | donor | Donor template for | R126 | n.a. | AGA | n.a. | TTR | n.a. | L | n.a. | ATTGCACAA | ATcGCgCAg | Cpf1 | 161 | + |
| | | R126L with silent | | | | | | | | | | | | | |
| | | mutation (for Cpf1) | | | | | | | | | | | | | |
| 94 | donor | Donor template for G209 | G208/ | n.a. | GGA | n.a. | — | n.a. | — | n.a. | GACAAAAGG | cACgAAgGG | Cpf1 | 154 | − |
| | | with silent mutation (for | G209 | | | | | | | | | | | | |
| | | Cpf1) | | | | | | | | | | | | | |
| 95 | donor | Donor template for | G398 | n.a. | GGT | n.a. | GCN | n.a. | A | n.a. | CAGGGTTTGAAAA | CAaGGaTTGAgAA | Cpf1 | 155 | − |
| | | G398A with silent | | | | | | | | | | | | | |
| | | mutation (for Cpf1) | | | | | | | | | | | | | |
| 96 | donor | Donor template for | F420 | n.a. | TTT | n.a. | GTN | n.a. | V | n.a. | ATCGGAGAAAGC | gTCtGAcAAtGC | Cpf1 | 191 | − |
| | | F420V with silent | | | | | | | | | | | | | |
| | | mutation (for Cpf1) | | | | | | | | | | | | | |
| 97 | gDNA | Genomic DNA (gDNA) | G209 | n.a. | GGA | n.a. | — | n.a. | — | n.a. | n.a. | n.a. | Cas9 | 37006 | + |
| | | sequence of G209 mutant | | | | | | | | | | | | | |
| | | of Beta vulgaris PPO2 | | | | | | | | | | | | | |
| | | with silent mutation | | | | | | | | | | | | | |
| 98 | CDS | cDNA sequence of G209 | G209 | n.a. | GGA | n.a. | — | n.a. | — | n.a. | n.a. | n.a. | Cas9 | 1572 | |
| | | mutant of Beta vulgaris | | | | | | | | | | | | | |
| | | PPO2 | | | | | | | | | | | | | |
| 99 | gDNA | Genomic DNA (gDNA) | G398 | n.a. | GGT | n.a. | GCT | n.a. | A | n.a. | n.a. | n.a. | Cas9 | 37009 | |
| | | sequence of G398A | | | | | | | | | | | | | |
| | | mutant of Beta vulgaris | | | | | | | | | | | | | |
| | | PPO2 with silent mutation | | | | | | | | | | | | | |
| 100 | gDNA | Genomic DNA (gDNA) | L397 | F420 | CTC | TTT | GAR | GTN | E | V | n.a. | n.a. | Cas9 | 37009 | |
| | | sequence of L397E and | | | | | | | | | | | | | |
| | | F420V mutant of Beta | | | | | | | | | | | | | |
| | | vulgaris PPO2 with silent | | | | | | | | | | | | | |
| | | mutation | | | | | | | | | | | | | |
| 101 | CDS | cDNA sequence of L397E | L397 | F420 | CTC | TTT | GAR | GTN | E | V | n.a. | n.a. | Cas9 | 1575 | |
| | | and F420V mutant of | | | | | | | | | | | | | |
| | | Beta vulgaris PPO2 | | | | | | | | | | | | | |
| 102 | gDNA | Genomic DNA (gDNA) | R126 | n.a. | AGA | n.a. | CTN | n.a. | L | n.a. | n.a. | n.a. | Cpf1 | 37009 | |
| | | sequence of R126L | | | | | | | | | | | | | |
| | | mutant of Beta vulgaris | | | | | | | | | | | | | |
| | | PPO2 with silent mutation | | | | | | | | | | | | | |
| 103 | CDS | cDNA sequence of | R126 | n.a. | AGA | n.a. | CTN | n.a. | L | n.a. | n.a. | n.a. | Cpf1 | 1575 | |
| | | R126L mutant of Beta | | | | | | | | | | | | | |
| | | vulgaris PPO2 | | | | | | | | | | | | | |
| 104 | gDNA | Genomic DNA (gDNA) | G209 | n.a. | GGA | n.a. | — | n.a. | — | n.a. | n.a. | n.a. | Cpf1 | 37006 | |
| | | sequence of G209 mutant | | | | | | | | | | | | | |
| | | of Beta vulgaris PPO2 | | | | | | | | | | | | | |
| | | with silent mutation | | | | | | | | | | | | | |
| 105 | CDS | cDNA sequence of G209 | G209 | n.a. | GGA | n.a. | — | n.a. | — | n.a. | n.a. | n.a. | Cpf1 | 1572 | |
| | | mutant of Beta vulgaris | | | | | | | | | | | | | |
| | | PPO2 | | | | | | | | | | | | | |
| 106 | gDNA | Genomic DNA (gDNA) | G398 | n.a. | GGT | n.a. | GCT | n.a. | A | n.a. | n.a. | n.a. | Cpf1 | 37009 | |
| | | sequence of G398A | | | | | | | | | | | | | |
| | | mutant of Beta vulgaris | | | | | | | | | | | | | |
| | | PPO2 with silent mutation | | | | | | | | | | | | | |
| 107 | gDNA | Genomic DNA (gDNA) | L397 | F420 | CTC | TTT | GAR | GTN | E | V | n.a. | n.a. | Cpf1 | 37009 | |
| | | sequence of F420V | | | | | | | | | | | | | |
| | | mutant of Beta vulgaris | | | | | | | | | | | | | |
| | | PPO2 with silent mutation | | | | | | | | | | | | | |
| 108 | CDS | cDNA sequence of L397E | L397 | F420 | CTC | TTT | GAR | GTN | E | V | n.a. | n.a. | Cpf1 | 1575 | |
| | | and F420V mutant of | | | | | | | | | | | | | |
| | | Beta vulgaris PPO2 | | | | | | | | | | | | | |
| 109 | primer | KASP marker primer | R126 | n.a. | n.a. | n.a. | n.a. | n.a. | n.a. | n.a. | n.a. | n.a. | n.a. | 45 | |
| | | alleleX S04 | | | | | | | | | | | | | |
| 110 | primer | KASP marker primer | R126 | n.a. | n.a. | n.a. | n.a. | n.a. | n.a. | n.a. | n.a. | n.a. | n.a. | 48 | |
| | | alleleY S04 | | | | | | | | | | | | | |
| 111 | primer | KASP marker primer | R126 | n.a. | n.a. | n.a. | n.a. | n.a. | n.a. | n.a. | n.a. | n.a. | n.a. | 26 | |
| | | common S04 | | | | | | | | | | | | | |

OC1—original codon 1
OC2—original codon 2
CC1—codon change 1
CC2—codon change 2
AA1—amino acid 1
AA2—amino acid 2
Sil Mut OS—Original sequence
Sil Mut CS—Changed sequence after introducing silent mutations (donor template)
+/− strand
*For SEQ ID: 90, the silent mutation in the seed region of the guide, not in the PAM site

### DETAILED DESCRIPTION

### Definitions

[0022] While the following terms are believed to be well understood by one of ordinary skill in the art, the following definitions are set forth to facilitate explanation of the presently disclosed subject matter.

[0023] Following long-standing patent law convention, the terms “a,” “an,” and “the” refer to “one or more” when used in this application, including the claims. For example, the phrase “a cell” refers to one or more cells, and in some embodiments can refer to a tissue and/or an organ. Similarly, the phrase “at least one”, when employed herein to refer to an entity, refers to, for example, 1, 2, 3, 4, 5, 6, 7, 8, 9, 10, 15, 20, 25, 30, 35, 40, 45, 50, 75, 100, or more of that entity, including but not limited to all whole number values between 1 and 100 as well as whole numbers greater than 100.

[0024] Unless otherwise indicated, all numbers expressing quantities of ingredients, reaction conditions, and so forth used in the specification and claims are to be understood as being modified in all instances by the term “about.” The term “about,” as used herein when referring to a measurable value such as an amount of mass, weight, time, volume, concentration or percentage is meant to encompass variations of in some embodiments±20%, in some embodiments±10%, in some embodiments±5%, in some embodiments±1%, in some embodiments±0.5%, and in some embodiments±0.1% from the specified amount, as such variations are appropriate to perform the disclosed methods and/or employ the disclosed compositions, nucleic acids, polypeptides, etc. Accordingly, unless indicated to the contrary, the numerical parameters set forth in this specification and attached claims are approximations that can vary depending upon the desired properties sought to be obtained by the presently disclosed subject matter.

[0025] As used herein, the term “and/or” when used in the context of a list of entities, refers to the entities being present singly or in combination. Thus, for example, the phrase “A, B, C, and/or D” includes A, B, C, and D individually, but also includes any and all combinations and subcombinations of A, B, C, and D (e.g., AB, AC, AD, BC, BD, CD, ABC, ABD, and BCD). In some embodiments, one or more of the elements to which the “and/or” refers can also individually be present in single or multiple occurrences in the combinations(s) and/or subcombination(s).

[0026] The term “engineered” or “genetically engineered” refers to any man-made manipulation of a genome of a cell of interest (e.g., by insertion, deletion or substitution of nucleic acids). In some embodiments the term “engineered” means that (i) at least one of the genetic changes to the nucleic acid encoding a protoporphyrinogen oxidase 2 (PPO2) amino acid sequence is not exclusively obtained by an essentially biological process or (ii) said nucleic acid encoding a protoporphyrinogen oxidase 2 (PPO2) amino acid sequence has been introduced or modified by a step of a technical nature so that the introduction or modification is not exclusively the result of the mixing of the genes of the plants by sexual crossing.

[0027] “Homologous sequences” or “homologs” or “orthologs” are thought, believed, or known to be functionally related. A functional relationship may be indicated in any one of a number of ways, including, but not limited to: (a) degree of sequence identity and/or (b) the same or similar biological function. Preferably, both (a) and (b) are indicated. Homology can be determined using software programs readily available in the art, such as NCBI BLAST (Basic Local Alignment Search Tool), using default parameters.

[0028] As used herein, the term “at least a portion” or “fragment” of a nucleic acid or polypeptide means a portion having the minimal size characteristics of such sequences, or any larger fragment of the full-length molecule, up to and including the full length molecule. A fragment of a polynucleotide of the disclosure may encode a biologically active portion of a genetic regulatory element. A biologically active portion of a genetic regulatory element can be prepared by isolating a portion of one of the polynucleotides of the disclosure that comprises the genetic regulatory element and assessing activity as described herein. Similarly, a portion of a polypeptide may be 4 amino acids, 5 amino acids, 6 amino acids, 7 amino acids, and so on, going up to the full-length polypeptide. The length of the portion to be used will depend on the particular application. A portion of a nucleic acid useful as a hybridization probe or targeting region of a guide RNA may be as short as 12 nucleotides; in some aspects, it is or is about 15, 20, or 25 nucleotides. A portion of a polypeptide useful as an epitope may be as short as 4 amino acids. A portion of a polypeptide that performs the function of the full-length polypeptide would generally be longer than 4 amino acids. In some cases, a portion of a polypeptide that performs the function of the full-length polypeptide contains 1, 2, 3, 4, 5, 6, 7, 8, 9, or 10 amino acids deleted from the N and/or C-terminus.

[0029] As used herein, the terms “endogenous,” and “native” refer to the naturally occurring copy of a gene or promoter.

[0030] As used herein, the term “naturally occurring” refers to a gene derived from a naturally occurring source. In some aspects, a naturally occurring gene refers to a gene of a wild type (non-transgene) gene, whether located in its endogenous setting within the source organism, or if placed in a “heterologous” setting, when introduced in a different organism. Thus, for the purposes of this disclosure, a “non-naturally occurring” gene is a gene that has been mutated or otherwise modified, or synthesized, to have a different sequence from known natural genes. In some aspects, the modification may be at the protein level (e.g., amino acid substitutions). In other aspects, the modification may be at the DNA level, without any effect on protein sequence (e.g., codon optimization).

[0031] As used herein, the term “heterologous” refers to an amino acid or a nucleic acid sequence (e.g., gene or promoter), which is not naturally found in the particular organism or is not naturally found in a particular context (e.g., genomic or plasmid location) in the particular organism. For example, a native promoter or other nucleic acid sequence of Beta vulgaris can be heterologous when operably linked to a nucleic acid sequence it is not operably linked to in a wild-type Beta vulgaris, or when it is delivered in a non-native form such as in a heterologous plasmid or a heterologous nucleic acid fragment.

[0032] As used herein, the term “exogenous” is used interchangeably with the term “heterologous,” and refers to a substance coming from some source other than its native source. For example, the terms “exogenous protein,” or “exogenous gene” refer to a protein or gene from a non-native source or location, and that have been artificially supplied to a biological system.

[0033] As used herein, the term “transgenic” refers to an organism that contains genetic material into which DNA from another species has been artificially introduced. The term “non-transgenic” thus refers to an organism which does not comprise genetic material from another species.

[0034] As used herein, the term “cisgenesis” refers to genetic modification of a recipient organism with a gene (cisgene) from a crossable, sexually compatible, organism.

[0035] As used herein, the term “intragenesis” is genetic modification of a recipient organism that involves the insertion of a reorganized, full or partial coding region of a gene combined frequently with a promoter and/or terminator from another gene of the same species or a crossable species.

[0036] As used herein, the phrases “recombinant construct”, “expression construct”, “chimeric construct”, “construct”, and “recombinant DNA construct” are used interchangeably herein. A recombinant construct comprises an artificial combination of nucleic acid fragments, e.g., regulatory and coding sequences that are not found together in nature. For example, a chimeric construct may comprise regulatory sequences and coding sequences that are derived from different sources, or regulatory sequences and coding sequences derived from the same source, but arranged in a manner different than that found in nature. Such construct may be used by itself or may be used in conjunction with a vector. If a vector is used then the choice of vector is dependent upon the method that will be used to transform host cells as is well known to those skilled in the art. For example, a plasmid vector can be used. The vector may be a viral vector that is suitable as a delivery vehicle for delivery of the nucleic acid, or mutant thereof, to a cell, or the vector may be a non-viral vector which is suitable for the same purpose. Examples of viral and non-viral vectors for delivery of DNA to cells and tissues are well known in the art and are described, for example, in Ma et al. (1997, Proc. Natl. Acad. Sci. U.S.A. 94:12744-12746).

[0037] The skilled artisan is well aware of the genetic elements that must be present on the vector in order to successfully transform, select and propagate host cells comprising any of the isolated nucleic acid fragments of the disclosure. The skilled artisan will also recognize that different independent transformation events will result in different levels and patterns of expression (Jones et al., (1985) EMBO J. 4:2411-2418; De Almeida et al., (1989) Mol. Gen. Genetics 218:78-86), and thus that multiple events must be screened in order to obtain lines displaying the desired expression level and pattern. Such screening may be accomplished by Southern blot analysis of DNA, Northern blot analysis of mRNA expression, immunoblotting analysis of protein expression, or phenotypic analysis, among others. Vectors can be plasmids, viruses, bacteriophages, pro-viruses, phagemids, transposons, artificial chromosomes, and the like, that replicate autonomously or can integrate into a chromosome of a host cell. A vector can also be a naked RNA polynucleotide, a naked DNA polynucleotide, a polynucleotide composed of both DNA and RNA within the same strand, a poly-lysine-conjugated DNA or RNA, a peptide-conjugated DNA or RNA, a liposome-conjugated DNA, or the like, that is not autonomously replicating.

[0038] The term “operably linked” means in this context the sequential arrangement of the promoter polynucleotide according to the disclosure with a further oligo- or polynucleotide, resulting in transcription of said further polynucleotide. In some aspects, the promoter sequences of the present disclosure are inserted just prior to a gene's 5′UTR, or open reading frame. In other aspects, the operably linked promoter sequences and gene sequences of the present disclosure are separated by one or more linker nucleotides.

[0039] A cell has been “genetically modified” or “transformed” or “transfected” by exogenous DNA, e.g. a recombinant expression vector, when such DNA has been introduced inside the cell. The presence of the exogenous DNA results in permanent or transient genetic change. The transforming DNA may or may not be integrated (covalently linked) into the genome of the cell. In prokaryotes, yeast, and mammalian cells for example, the transforming DNA may be maintained on an episomal element such as a plasmid. With respect to eukaryotic cells, a stably transformed cell is one in which the transforming DNA has become integrated into a chromosome so that it is inherited by daughter cells through chromosome replication. This stability is demonstrated by the ability of the eukaryotic cell to establish cell lines or clones that comprise a population of daughter cells containing the transforming DNA. A “clone” is a population of cells derived from a single cell or common ancestor by mitosis. A “cell line” is a clone of a primary cell that is capable of stable growth in vitro for many generations.

[0040] A “target nucleic acid” as used herein is a polynucleotide (e.g., RNA, DNA) that includes a “target site” or “target sequence.” The terms “target site” or “target sequence” are used interchangeably herein to refer to a nucleic acid sequence present in a target nucleic acid to which a targeting segment of a subject guide nucleic acid will bind, provided sufficient conditions for binding exist. Suitable hybridization conditions include physiological conditions normally present in a cell. For a double stranded target nucleic acid, the strand of the target nucleic acid that is complementary to and hybridizes with the guide nucleic acid is referred to as the “complementary strand”; while the strand of the target nucleic acid that is complementary to the “complementary strand” (and is therefore not complementary to the guide nucleic acid) is referred to as the “noncomplementary strand” or “non-complementary strand”. In embodiments where the target nucleic acid is a single stranded target nucleic acid (e.g., single stranded DNA (ssDNA), single stranded RNA (ssRNA)), the guide nucleic acid is complementary to and hybridizes with single stranded target nucleic acid.

[0041] A nucleic acid molecule that binds to an RNA-guided endonuclease (e.g., the Cas9 Polypeptide) and targets the polypeptide to a specific location within the target nucleic acid is referred to herein as a “guide nucleic acid”. When the guide nucleic acid is an RNA molecule, it can be referred to as a “guide RNA” or a “gRNA”. A guide nucleic acid comprises two segments, a first segment (referred to herein as a “targeting segment”); and a second segment (referred to herein as a “protein-binding segment”). By “segment” it is meant a segment/section/region of a molecule, e.g., a contiguous stretch of nucleotides in a nucleic acid molecule. A segment can also mean a region/section of a complex such that a segment may comprise regions of more than one molecule. For example, in some embodiments the protein-binding segment (described below) of a guide nucleic acid is one nucleic acid molecule (e.g., one RNA molecule) and the protein-binding segment therefore comprises a region of that one molecule. In other embodiments, the protein-binding segment (described below) of a guide nucleic acid comprises two separate molecules that are hybridized along a region of complementarity. As an illustrative, non-limiting example, a protein-binding segment of a guide nucleic acid that comprises two separate molecules can comprise (i) base pairs 40-75 of a first molecule (e.g., RNA molecule, DNA/RNA hybrid molecule) that is 100 base pairs in length; and (ii) base pairs 10-25 of a second molecule (e.g., RNA molecule) that is 50 base pairs in length. The definition of “segment,” unless otherwise specifically defined in a particular context, is not limited to a specific number of total base pairs, is not limited to any particular number of base pairs from a given nucleic acid molecule, is not limited to a particular number of separate molecules within a complex, and may include regions of nucleic acid molecules that are of any total length and may or may not include regions with complementarity to other molecules.

[0042] The first segment (targeting segment) of a guide nucleic acid (e.g., guide RNA or gRNA) comprises a nucleotide sequence that is complementary to a specific sequence (a target site) within a target nucleic acid (e.g., a target ssRNA, a target ssDNA, the complementary strand of a double stranded target DNA, etc.). The protein-binding segment (or “protein-binding sequence”) interacts with an RNA-guided endonuclease (e.g., Cas9) polypeptide. Site-specific binding and/or cleavage of the target nucleic acid can occur at locations determined by base-pairing complementarity between the guide nucleic acid (e.g., guide RNA) and the target nucleic acid.

[0043] The protein-binding segment of a subject guide nucleic acid comprises two complementary stretches of nucleotides that hybridize to one another to form a double stranded RNA duplex (dsRNA duplex).

[0044] A subject guide nucleic acid (e.g., guide RNA) linked to a donor polynucleotide forms a complex with a subject RNA-guided endonuclease (e.g., Cas9) (i.e., binds via non-covalent interactions). The guide nucleic acid (e.g., guide RNA) provides target specificity to the complex by comprising a nucleotide sequence that is complementary to a sequence of a target nucleic acid. Thus, the RNA-guided endonuclease (e.g., Cas9) of the complex provides site-specific or “targeted” activity by virtue of its association with the protein-binding segment of the guide nucleic acid.

[0045] In some embodiments, a subject guide nucleic acid (e.g., guide RNA) comprises two separate nucleic acid molecules and is referred to herein as a “dual guide nucleic acid.” In some embodiments, the subject guide nucleic acid is a single nucleic acid molecule (single polynucleotide) and is referred to herein as a “single guide nucleic acid.” The term “guide nucleic acid” is inclusive, referring to both dual guide nucleic acids and to single guide nucleic acids and the term “guide RNA” is also inclusive, referring to both dual guide RNA (dgRNA) and single guide RNA (sgRNA).

[0046] In some embodiments, a guide nucleic acid is a DNA/RNA hybrid molecule. In such embodiments, the protein-binding segment of the guide nucleic acid is RNA and forms an RNA duplex. However, the targeting segment of a guide nucleic acid can be DNA. Thus, if a DNA/RNA hybrid guide nucleic acid is a dual guide nucleic acid, the targeting segment can be DNA and the duplex-forming segment can be RNA. In such embodiments, the duplex-forming segment of the “activator” molecule can be RNA (e.g., in order to form an RNA-duplex with the duplex-forming segment of the targeting segment), while nucleotides of the “activator” molecule that are outside of the duplex-forming segment can be DNA (in which case the activator molecule is a hybrid DNA/RNA molecule) or can be RNA (in which case the activator molecule is RNA). If a DNA/RNA hybrid guide nucleic acid is a single guide nucleic acid, then the targeting segment can be DNA, the duplex-forming segments (which make up the protein-binding segment) can be RNA, and nucleotides outside of the targeting and duplex-forming segments can be RNA or DNA.

[0047] An exemplary dual guide nucleic acid comprises a CRISPR-RNA (crRNA) molecule and a corresponding trans-activating crRNA (tracrRNA) molecule. The crRNA molecule comprises both the targeting segment (single stranded) of the guide nucleic acid and a stretch (“duplex-forming segment”) of nucleotides that forms one half of the dsRNA duplex of the protein-binding segment of the guide nucleic acid. The corresponding tracrRNA molecule comprises a stretch of nucleotides (duplex-forming segment) that forms the other half of the dsRNA duplex of the protein-binding segment of the guide nucleic acid. In other words, a stretch of nucleotides of a crRNA molecule are complementary to and hybridize with a stretch of nucleotides of a tracrRNA molecule to form the dsRNA duplex of the protein-binding domain of the guide nucleic acid. The crRNA-like molecule additionally provides the single stranded targeting segment. Thus, the crRNA and the tracrRNA (as a corresponding pair) hybridize to form a dual guide nucleic acid. The exact sequence of a given crRNA or tracrRNA molecule is characteristic of the species in which the RNA molecules are found.

[0048] The term “protospacer” refers to the DNA sequence targeted by a crRNA guide strand. In some aspects the protospacer sequence hybridizes with the crRNA guide sequence of a CRISPR complex.

[0049] The “protospacer-adjacent motif” or “PAM” sequence is a 2-6 base pair DNA sequence immediately following the DNA sequence targeted by an RNA-guided endonuclease (e.g., Cas9). The PAM sequences is required for cleavage of the target nucleic acid and varies depending on the source of the RNA-guided endonuclease (e.g., Cas9). For example, in case of the Streptococcus pyogenes Cas9 the PAM sequence is NGG. In aspects of the present disclosure, the PAM sequences is mutated by the donor polynucleotide SEQ ID NO: 93 such that further cleavage of the target site is prevented. If it is not possible to introduce silent mutations in the PAM sequence, these can also be introduced in the seed region of the gRNA.

[0050] In some instances, a component, e.g., a nucleic acid component (e.g., a guide nucleic acid, etc.); a protein component (e.g., an RNA-guided endonuclease, a Cas9 polypeptide, a variant RNA-guided endonuclease, a variant Cas9 polypeptide); and the like includes a label moiety. The terms “label”, “detectable label”, or “label moiety” as used herein refer to any moiety that provides for signal detection and may vary widely depending on the particular nature of the assay. Label moieties of interest include both directly detectable labels (e.g., a fluorescent label) and indirectly detectable labels (indirect labels, e.g., a binding pair member). A fluorescent label can be any fluorescent label, e.g., a fluorescent dye (e.g., fluorescein, Texas red, rhodamine, ALEXAFLUOR® labels, and the like), a fluorescent protein (e.g., green fluorescent protein (GFP), enhanced GFP (EGFP), yellow fluorescent protein (YFP), red fluorescent protein (RFP), cyan fluorescent protein (CFP), mCherry, mTomato, mTangerine, and any fluorescent derivative thereof, etc.).

[0051] Suitable detectable (directly or indirectly) label moieties for use in the methods include any moiety that is detectable by spectroscopic, photochemical, biochemical, immunochemical, electrical, optical, chemical, or other means. For example, suitable indirect labels include biotin (a binding pair member), which can be bound by streptavidin (which can itself be directly or indirectly labeled). Labels can also include: a radiolabel (a direct label) (e.g., 3H, 125I, 35S, 14C, or 32P); an enzyme (an indirect label) (e.g., peroxidase, alkaline phosphatase, galactosidase, luciferase, glucose oxidase, and the like); a fluorescent protein (a direct label) (e.g., green fluorescent protein, red fluorescent protein, yellow fluorescent protein, and any convenient derivatives thereof); a metal label (a direct label); a colorimetric label; a binding pair member; and the like. By “binding pair member” is meant one of a first and a second moiety, wherein the first and the second moiety have a specific binding affinity for each other. Suitable binding pairs include, but are not limited to: antigen/antibodies (for example, digoxigenin/anti-digoxigenin, dinitrophenyl (DNP)/anti-DNP, dansyl-X-anti-dansyl, fluorescein/anti-fluorescein, lucifer yellow/anti-lucifer yellow, and rhodamine anti-rhodamine), biotin/avidin (or biotin/streptavidin) and calmodulin binding protein (CBP)/calmodulin. Any binding pair member can be suitable for use as an indirectly detectable label moiety.

[0052] Sequence identity. “sequence identity” or “identity” in the context of two nucleic acid or polypeptide sequences includes reference to the number of residues in the two sequences which are the same when aligned for maximum correspondence over a specified comparison window. When percentage of sequence identity is used in reference to proteins it is recognized that residue positions which are not identical often differ by conservative amino acid substitutions, where amino acid residues are substituted for other amino acid residues with similar chemical properties (e.g., charge or hydrophobicity) and therefore do not change the functional properties of the molecule. Where sequences differ in conservative substitutions, the percent sequence identity may be adjusted upwards to correct for the conservative nature of the substitution. Sequences which differ by such conservative substitutions are said to have “sequence similarity” or “similarity.” Means for making this adjustment are well-known to those of skill in the art. Typically this involves scoring a conservative substitution as a partial rather than a full mismatch, thereby increasing the percentage sequence identity. Thus, for example, where an identical amino acid is given a score of 1 and a non-conservative substitution is given a score of zero, a conservative substitution is given a score between zero and 1. The scoring of conservative substitutions is calculated, e.g., according to the algorithm of Meyers and Miller, Computer Applic. Biol. Sci., 4:11-17 (1988). The comparison of sequences and determination of percent identity between two sequences can be accomplished using a mathematical algorithm. An example of a local alignment algorithm utilized for the comparison of sequences is the NCBI Basic Local Alignment Search Tool (BLAST®) (Altschul et al. 1990 J. Mol. Biol. 215:403-10), which is available from several sources, including the National Center for Biotechnology Information (NCBI, Bethesda, Md.) and on the Internet, for use in connection with the sequence analysis programs blastp, blastn, blastx, tblastn and tblastx. It can be accessed on the internet via the National Library of Medicine (NLM)'s world-wide-web URL. A description of how to determine sequence identity using this program is available at the NLM's website on BLAST tutorial. Another example of a mathematical algorithm utilized for the global comparison of sequences is the Clustal W and Clustal X (Larkin et al. 2007 Bioinformatics, 23, 2947-294, Clustal W and Clustal X version 2.0) as well as Clustal Omega. Unless otherwise stated, references to sequence identity used herein refer to the Clustal Omega.

[0053] A plant cell is a cell of a plant, taken from a plant, or derived through culture from a cell taken from a plant. Thus, the term “plant cell” includes without limitation cells within seeds, suspension cultures, embryos, meristematic regions, callus tissue, leaves, shoots, gametophytes, sporophytes, pollen, and microspores.

[0054] The phrase “plant part” refers to a part of a plant, including single cells and cell tissues such as plant cells that are intact in plants, cell clumps, and tissue cultures from which plants can be regenerated. Examples of plant parts include, but are not limited to, single cells and tissues from pollen, ovules, leaves, embryos, roots, root tips, anthers, flowers, fruits, stems, shoots, and seeds; as well as scions, rootstocks, protoplasts, calli, and the like.

[0055] As used herein, the term “resistant”, or “resistance”, describes a plant, line or variety that shows fewer or reduced symptoms to a herbicide than a susceptible (or more susceptible) plant, line or variety to that herbicide. This term is also applied to plants that show no symptoms, and may also be referred to as “high/standard resistance”.

[0056] As used herein, the term “tolerant” or “tolerance” describes a plant, line, or variety that shows some symptoms to a herbicide, but that are still able to produce marketable product with an acceptable yield. These lines may also be referred to as having “moderate/intermediate resistance”. Tolerant and moderate/intermediate resistant plant types are affected by a herbicide with a greater range of symptoms or damage compared to plant types with high resistance. Plant types with intermediate resistance will show less severe symptoms than susceptible plant varieties, when grown under similar field conditions and herbicide treatment.

[0057] Methods of evaluating resistance are well known to one skilled in the art. Such evaluation may be performed by visual observation of a plant, or a plant part (e.g., leaves, roots, flowers, fruits et. al) in determining the severity of symptoms. For example, when each plant is given a resistance score on a scale of 1 to 5 based on the severity of the reaction or symptoms, with 1 being the resistance score applied to the most resistant plants (e.g., no symptoms, or with the least symptoms), and 5 the score applied to the plants with the most severe symptoms, then a line is rated as being resistant when at least 75% of the plants have a resistance score at a 1, 2, or 3 level, while susceptible lines are those having more than 25% of the plants scoring at a 4 or 5 level. In some embodiments, at least 90% of the plants in a resistant line will have a score of 1, 2, or 3. If a more detailed visual evaluation is possible, then one can use a scale from 1 to 10 so as to broaden out the range of scores and thereby hopefully provide a greater scoring spread among the plants being evaluated. Instead of scoring individual plants, one can also provide a score on a group of plants, where the plants in one group would belong to the same line and be clones of each other. Any given component, or combination of components can be unlabeled, or can be detectably labeled with a label moiety. In some embodiments, when two or more components are labeled, they can be labeled with label moieties that are distinguishable from one another.

[0058] General methods in molecular and cellular biochemistry can be found in such standard textbooks as Molecular Cloning: A Laboratory Manual, 3rd Ed. (Sambrook et al., HaRBor Laboratory Press 2001); Short Protocols in Molecular Biology, 4th Ed. (Ausubel et al. eds., John Wiley & Sons 1999); Protein Methods (Bollag et al., John Wiley & Sons 1996); Nonviral Vectors for Gene Therapy (Wagner et al. eds., Academic Press 1999); Viral Vectors (Kaplift & Loewy eds., Academic Press 1995); Immunology Methods Manual (I. Lefkovits ed., Academic Press 1997); Cell and Tissue Culture: Laboratory Procedures in Biotechnology (Doyle & Griffiths, John Wiley & Sons 1998); and Current Protocols in Molecular Biology (Ausubel et al. eds., John Wiley & Sons 2003), including supplements 1-117, the disclosures of which are incorporated herein by reference.

### Overview

[0059] The present disclosure relates to Beta vulgaris plants having resistance to PPO herbicides and methods of producing said plants by targeted genome editing. The disclosure further relates to genetic sequences for use with targeted genome editing technologies and/or genotyping, and herbicide-resistant PPO proteins produced from genetically engineered, non-transgenic Beta vulgaris plants.

[0060] Agricultural crop production often utilizes herbicide tolerance (HT) traits predominantly introduced by conventional plant transformation methods, which results in transgenic crops with the desired traits. However, DNA can be modified in a targeted way using genome editing techniques, to develop novel, desired traits in plants of interest. The present disclosure teaches utilization of an emerging technology including the targeted genome editing techniques, such as CRISPR/Cas system, to establish herbicide tolerance traits, thereby producing non-transgenic crops with the desired traits.

[0061] The disclosure provides introduction of commercially relevant herbicide tolerance traits into crops of interest by editing the endogenous PPO genes in a targeted, non-transgenic manner. Thus, the disclosure provides genetically engineered, endogenous herbicide-tolerant protoporphyrinogen oxidases (PPO) useful for providing PPO herbicide tolerance in the crops of interest, including fodder beet and sugar beet.

[0062] Also, the disclosure provides making a non-transgenic plant with the herbicide tolerance traits introduced by the genome editing technique taught herein, and further producing the non-transgenic plant combined with one or more other herbicide-tolerance trait(s).

Beta vulgaris

[0063] Beta vulgaris (“Beet”), is a root vegetable of the subfamily Betoideae within the family Amaranthaceae. Examples of beet include sugar beet, garden beets (red beet), leafy beets (chard), and fodder beets (forage). Sugar beet (B. vulgaris L. ssp. vulgaris) is grown both as a garden vegetable and, since the mid-18th century, for its sugar content. Sugar from sugar beet accounts for approximately 20-30% of the world's annual production of sugar, the rest being extracted from sugar cane (Yamane, Takeo. “Sugar beet”. Encyclopedia Britannica, 12 Apr. 2016, available on the world wide web at britannica.com/plant/sugar-beet; Dohm, J., Minoche, A., Holtgräwe, D. et al. The genome of the recently domesticated crop plant sugar beet (Beta vulgaris) is published in Nature 505, 546-549 (2014)).

[0064] As sugar beet has reached such a high yield potential, new tolerances and resistances are needed for herbicides such as PPO herbicides.

### Protoporphyrinogen Oxidase (PPO) Herbicides

[0065] As used herein, “herbicide” is any molecule that is used to control, prevent, or interfere with the growth of one or more undesired plants in a cultivated area (e.g. weeds). Exemplary herbicides include acetyl-CoA carboxylase (ACCase) inhibitors (for example aryloxyphenoxy propionates and cyclohexanediones); acetolactate synthase (ALS) inhibitors (for example sulfonylureas, imidazolinones, triazolopyrimidines, and triazolinones); 5-enolpyruvylshikimate-3-phosphate synthase (EPSPS) inhibitors (for example glyphosate), synthetic auxins (for example phenoxys, benzoic acids, carboxylic acids, semicarbazones), photosynthesis (photosystem II) inhibitors (for example triazines, triazinones, nitriles, benzothiadiazoles, and ureas), glutamine synthetase (GS) inhibitors (for example glufosinate and bialaphos), 4-hydroxyphenylpyruvate dioxygenase (HPPD) inhibitors (for example isoxazoles, pyrazolones, and triketones), protoporphyrinogen oxidase (PPO) inhibitors (for example diphenylethers, N-phenylphthalimide, aryl triazinones, and pyrimidinediones), very long-chain fatty acid inhibitors (for example chloroacetamides, oxyacetamides, and pyrazoles), cellulose biosynthesis inhibitors (for example indaziflam), photosystem I inhibitors (for example paraquat), microtubule assembly inhibitors (for example pendimethalin), and phytoene desaturase (PDS) inhibitors (for example norflurazone), among others.

[0066] A PPO herbicide is a chemical that targets and inhibits the enzymatic activity of a protoporphyrinogen oxidase (PPO), which catalyzes the dehydrogenation of protoporphyrinogen IX to form protoporphyrin IX, which is the precursor to heme and chlorophyll. Inhibition of protoporphyrinogen oxidase causes formation of reactive oxygen species, resulting in cell membrane disruption and ultimately the death of susceptible cells. PPO herbicides are well-known in the art and commercially available. Exemplary PPO herbicides are shown in Table 2 below.

TABLE 2
Exemplary PPO herbicides

| PPO Herbicide | Chemical Family | 1X Rate |
|---|---|---|
| acifluorfen | Diphenylethers | 420 g ai/ha |
| fomesafen | Diphenylethers | 420 g ai/ha |
| lactofen | Diphenylethers | 70-220 g ai/ha |
| fluoroglycofen-ethyl | Diphenylethers | 15-40 g ai/ha |
| oxyfluorfen | Diphenylethers | 0.28-2.24 kg ai/ha |
| flumioxazin | N-phenylphthalimide | 70-105 g ai/ha |
| azafenidin | Triazolinone | 240 g ai/ha |
| carfentrazone-ethyl | Triazolinone | 4-36 g ai/ha |
| sulfentrazone | Triazolinone | 0.1-0.42 kg ai/ha |
| fluthiacet-methyl | Thiadiazole | 3-15 g ai/ha |
| oxadiargyl | Oxadiazole | 50-150 g ai/ha |
| oxadiazon | Oxadiazole | 2.24-4.48 kg ai/ha |
| pyraflufen-ethyl | Phenylpyrazole | 6-12 g ai/ha |
| saflufenacil | Pyrimidine dione | 25-50 g/ha |
| S-3100 | Pyrimidine dione | 5-80 g/ha |

[0067] Examples of PPO herbicides include, but are not limited to, diphenylethers (such as acifluorfen, its salts and esters, aclonifen, bifenox, its salts and esters, ethoxyfen, its salts and esters, fluoronitrofen, furyloxyfen, halosafen, chlomethoxyfen, fluoroglycofen, its salts and esters, lactofen, its salts and esters, oxyfluorfen, and fomesafen, its salts and esters); thiadiazoles (such as fluthiacet-methyl and thidiazimin); pyrimidinediones or phenyluracils (such as benzfendizone, butafenacil, ethyl [3-2-chloro-4-fluoro-5-(1-methyl-6-trifluoromethyl-2,4-dioxo-1,2,3,4-tetrahydropyrimidin-3-yl) phenoxy]-2-pyridyloxy] acetate (CAS Registry Number 353292-31-6 and referred to herein as S-3100), trifludimoxazin, flupropacil, saflufenacil, and tiafenacil); phenylpyrazoles (such as fluazolate, pyraflufen and pyraflufen-ethyl); oxadiazoles (such as oxadiargyl and oxadiazon); triazolinones (such as azafenidin, bencarbazone, carfentrazone, its salts and esters, and sulfentrazone); oxazolidinediones (such as pentoxazone); N-phenylphthalimides (such as cinidon-ethyl, flumiclorac, flumiclorac-pentyl, and flumioxazin); benzoxazinone derivatives (such as 1,5-dimethyl-6-thioxo-3-(2,2,7-triflworo-3,4-dihydro-3-oxo-4-prop-2-ynyl-2//-1,4-benzoxazin-6-yl)-1,3,5-triazinane-2,4-dione); flufenpyr and flufenpyr-ethyl; pyraclonil; trifludimoxazin, and profluazol.

### Targeted Genome Editing for Production of Engineered Proteins

[0068] The genome of sugar beet was recently sequenced (Dohm, J., Minoche, A., Holtgräwe, D. et al. The genome of the recently domesticated crop plant sugar beet (Beta vulgaris). Nature 505, 546-549 (2014)). Emerging genome editing technology provides the opportunity to establish non-transgenic herbicide tolerant traits, which substantially reduces costs and development times, which is key for crops like sugar beet which have a limited market size. In other crops it has previously been reported that PPO herbicide tolerance was only achievable through overexpression of resistant genes (Lermontova I, Grimm B. Overexpression of plastidic protoporphyrinogen IX oxidase leads to resistance to the diphenyl-ether herbicide acifluorfen. Plant Physiology. 2000; 122 (1): 75-84; Adhikari P, Goodrich E, Fernandes S B, et al. Genetic variation associated with PPO-inhibiting herbicide tolerance in sorghum. PLOS One. 2020; 15 (10) Published 2020 Oct. 14; Li X, Nicholl D. Development of PPO inhibitor-resistant cultures and crops. Pest Manag Sci. 2005 March; 61 (3): 277-85). However, as disclosed here the inventors found that commercially relevant herbicide tolerance in sugar beet was achieved by editing the endogenous PPO genes.

[0069] As shown in FIG. 1, a substitution of arginine at amino acid position no. 126 of the wild type Beta vulgaris PPO2 protein sequence (SEQ ID NO: 3) may confer resistance to a PPO herbicide. In some embodiments, the arginine at position no. 126 is substituted for alanine, glycine, leucine, isoleucine, or methionine. In some aspects, the arginine at position no. 126 is substituted for leucine.

[0070] In some aspects, the substitution of arginine at position no. 126 is combined with one or more of the genetic alterations described below in Table 3.

TABLE 3
Additional genetic alterations

| Genetic alterations to | Amino acid |
|---|---|
| combine with R126 substitution: | position (FIG. 1) |
| Deletion of glycine | 208 or 209 |
| Substitution of leucine for glutamic acid | 397 |
| Substitution of phenylalanine for valine, | 420 |
| leucine, isoleucine, or methionine | |
| Substitution of glycine for alanine | 398 |

[0071] The disclosure provides novel, engineered proteins and the recombinant DNA molecules that encode them. As used herein, the term “engineered” refers to a non-natural DNA, protein, cell, or organism that would not normally be found in nature and was created by human intervention. An “engineered protein”, “engineered enzyme”, or “engineered PPO,” refers to a protein, enzyme, or PPO whose amino acid sequence was conceived of and created in the laboratory using one or more of the techniques of biotechnology, protein design, or protein engineering, such as molecular biology, protein biochemistry, bacterial transformation, plant transformation, site-directed mutagenesis, directed evolution using random mutagenesis, genome editing, gene editing, gene cloning, DNA ligation, DNA synthesis, protein synthesis, and DNA shuffling. For example, an engineered protein may have one or more deletions, insertions, or substitutions relative to the coding sequence of the wild-type protein and each deletion, insertion, or substitution takes place on one or more amino acids. Genetic engineering can be used to create a DNA molecule encoding an engineered protein, such as an engineered PPO that is herbicide tolerant and comprises at least one amino acid substitution or deletion relative to a wild-type PPO protein as described herein.

[0072] In some embodiments, the engineered proteins are genetically engineered with a targeted genome or gene editing system such as CRISPR-Cas system described below.

[0073] In some embodiments, provided is novel, engineered proteins that are herbicide-tolerant protoporphyrinogen oxidases (PPOs), as well as the recombinant, engineered DNA molecules encoding the herbicide-tolerant PPOs, compositions comprising the herbicide-tolerant PPO, and methods of using the herbicide-tolerant PPOs for weed control.

[0074] In some embodiments, engineered proteins (e.g. PPO2) provided by the disclosure have herbicide-tolerant protoporphyrinogen oxidase activity. As used herein, “herbicide-tolerant protoporphyrinogen oxidase” means the ability of a protoporphyrinogen oxidase to maintain at least some of its protoporphyrinogen oxidase activity in the presence of one or more PPO herbicide(s).

[0075] The term “protoporphyrinogen oxidase activity” means the ability to catalyze the six-electron oxidation (removal of electrons) of protoporphyrinogen IX to form protoporphyrin IX, that is, to catalyze the dehydrogenation of protoporphyrinogen to form protoporphyrin. Enzymatic activity of a protoporphyrinogen oxidase can be measured by any means known in the art, for example, by an enzymatic assay in which the production of the product of protoporphyrinogen oxidase or the consumption of the substrate of protoporphyrinogen oxidase in the presence of one or more PPO herbicide(s) is measured via fluorescence, high performance liquid chromatography (HPLC), or mass spectrometry (MS).

[0076] In some embodiments, the disclosure provides recombinant constructs comprising recombinant polynucleotides encoding engineered herbicide-tolerant protoporphyrinogen oxidases for expression in plants, parts and cells. In other embodiments, the disclosure provides engineered proteins having herbicide-tolerant protoporphyrinogen oxidase activity. In further embodiments, the disclosure provides methods and compositions for using protein engineering and bioinformatics tools to obtain and improve herbicide-tolerant protoporphyrinogen oxidases. The disclosure further provides methods and compositions for producing plants, parts and cells tolerant to PPO herbicides, and methods of weed control using the cells, plants, and seeds.

[0077] Examples of engineered proteins provided herein are herbicide-tolerant PPOs comprising (i) one or more amino acid substitution(s) selected from R126A, R126G, R126L, R126I, R126M, L397E, G398A, F420V, F420M, F420I, and F420L, and (ii) one or more amino acid deletion(s) selected from G208 and G209, including all possible combinations thereof, wherein the position of the amino acid substitution(s) and/or deletion(s) are relative to the amino acid position set forth in SEQ ID NO: 3. In specific embodiments, an engineered protein provided herein comprises one, two, three, four, or more of any combination of such substitutions and/or deletions described herein.

[0078] Because of the degeneracy of the genetic code, a variety of different DNA sequences can encode the altered or engineered proteins disclosed herein. DNA sequences encoding PPO enzymes with the amino acid substitutions and deletions described herein can be produced by introducing mutations into the DNA sequence encoding a wild-type PPO enzyme using methods known in the art. It is well within the capability of one of skill in the art to create alternative DNA sequences encoding the same, or essentially the same, altered or engineered proteins as described herein. These variant or alternative DNA sequences are within the scope of the embodiments described herein. As used herein, references to “essentially the same” sequence refers to sequences which encode amino acid substitutions, deletions, additions, or insertions that do not materially alter the functional activity of the protein encoded by the DNA molecule of the embodiments described herein. Allelic variants of the nucleotide sequences encoding a wild-type or engineered protein are also encompassed within the scope of the embodiments described herein.

[0079] The above referenced genomic alterations may be achieved by any number of means well known in art, for example by genome modification using site-specific integration or genome editing. Targeted modification of plant genomes through the use of genome editing methods can be used to create improved plant lines through modification of plant genomic DNA. As used herein “site-directed integration” or “site-specific integration” refers to genome editing methods the enable targeted insertion of one or more nucleic acids of interest into a plant genome. Suitable methods for altering a wild-type DNA sequence or a preexisting transgenic sequence or for inserting DNA into a plant genome at a pre-determined chromosomal site include any method known in the art. Exemplary methods include the use of sequence specific nucleases, such as zinc-finger nucleases, engineered or native meganucleases, TALE-endonucleases, or an RNA-guided endonucleases (for example, a Clustered Regularly Interspersed Short Palindromic Repeat (CRISPR)/Cas9 system, a CRISPR/Cpf1 system, a CRISPR/CasX system, a CRISPR/CasY system, a CRISPR/Cascade system). Several embodiments relate to methods of genome editing by using single-stranded oligonucleotides to introduce precise base pair modifications in a plant genome, as described by Sauer et al., Plant Physiology 170 (4): 1917-1928 (2016). Methods of genome editing to modify, delete, or insert nucleic acid sequences into genomic DNA are known in the art.

[0080] In some aspects, the present disclosure provides modification or replacement of an existing coding sequence, such as a PPO coding sequence or another existing transgenic insert, within a plant genome with a sequence encoding an engineered protein, such as an engineered PPO coding sequence of the present disclosure. Several embodiments relate to the use of a known genome editing methods, such as zinc-finger nucleases, engineered or native meganucleases, TALE-endonucleases, or an RNA-guided endonuclease (for example, a Clustered Regularly Interspersed Short Palindromic Repeat (CRISPR)/Cas9 system, a CRISPR/Cpf system, a CRISPR/CasX system, a CRISPR/CasY system, a CRISPR/Cascade system).

### Genome Editing by CRISPR

[0081] Conventional approaches to engineer herbicide resistance rely either on mutation breeding or introduction of novel genes into the genomes of crop species by transformation. Conventional plant transformation methods deliver exogenous DNA that integrates into the genome at random locations. Thus, to identify and isolate transgenic lines with desirable traits, it is necessary to generate and screen thousands of random-integration events. Using genome editing, DNA can be modified in a targeted way providing new alternatives to develop novel traits in plants.

[0082] Genome editing by CRISPR, which stands for Clustered Regularly Interspaced Short Palindromic Repeats, is based on a natural immune process used by bacteria to defend themselves against invading viruses. Indeed, in bacteria the invading viral DNA will be cut through use of a guide RNA (gRNA), or piece of RNA, and a CRISPR-associated protein (Cas). The last step of the bacterial immune process, when the gRNA is combined with Cas and cleaves the target DNA, has been adopted for genome editing in laboratories.

[0083] There are at least three main CRISPR system types (Type I, II, and III) and at least 10 distinct subtypes (Makarova, K. S., et. al., Nat Rev Microbiol. 2011 May 9; 9 (6): 467-477). Type I and III systems use Cas protein complexes and short guide polynucleotide sequences to target selected DNA regions. Type II systems rely on a single protein (e.g. Cas9) and the targeting guide polynucleotide, where a portion of the 5′ end of a guide sequence is complementary to a target nucleic acid. For more information on the CRISPR gene editing compositions and methods of the present disclosure, see U.S. Pat. Nos. 8,697,359; 8,889,418; 8,771,945; and 8,871,445, each of which is hereby incorporated in its entirety for all purposes.

[0084] CRISPR genome editing requires two components, a gRNA and a Cas enzyme. These components associate to form a ribonucleoprotein (RNP) complex, where after the gRNA can base pair with a complementary protospacer sequence (i.e. the target genomic sequence of about 20 bases in length) under the condition that a particular adjacent sequence, called a protospacer-adjacent motif (PAM), is present in the genome. The PAM is only a few bases long, and its sequence depends on the type of Cas enzyme used. Once the gRNA binds to the target DNA (protospacer), the Cas enzyme recognizes this complex and makes a precise cut at the target site.

[0085] Either Cas9 or Cas12a (also called Cpf1) can be used to cleave target DNA, resulting in a Double Strand Break (DSB). Each Cas enzyme is directed by the gRNA to a user-specified cut site in the genome. Like Cas9 nucleases, Cas12a1 family members contain a RuvC-like endonuclease domain, but lack the second HNH endonuclease domain of Cas9. Cas12a cleaves DNA in a staggered pattern in contrast to Cas9 which produces a blunt-end. Moreover, for cleavage Cas12a requires only one RNA rather than the two tracrRNA and crRNA needed by Cas9. For Cas9 as well as Cas12a, the target sequence of the gRNAs must be next to a PAM sequence. In the case of Cas9, the PAM sequence corresponds to NGG, where N is any base. The gRNA will recognize and bind to 20 nucleotides on the DNA strand opposite from the NGG PAM site. For Cas12a, the PAM sequence is TTTV, where V can represent A, C, or G. Using Alt-R Cas12a Ultra from Integrated DNA Technologies, a TTTT PAM sequence may also work. The “V” of the TTTV is immediately adjacent to the base at the 5′ end of the non-targeted strand side of the protospacer element. The guide RNA for Cas12a is relatively short and is approximately 40 to 44 bases long.

[0086] The damage caused by the double strand break (DSB) will be repaired in eukaryotic cells, primarily by two pathways: Non-Homologous End-Joining (NHEJ) and Homology Directed Repair (HDR). The HDR mechanism requires the presence of a donor DNA template containing regions of homology to both sites of the DNA break. This donor DNA can carry specific mutations and has to be delivered simultaneously with a preassembled Cas RNP complex composed of Cas9 or Cas12a and synthetically produced gRNAs.

[0087] Altogether, targeted cleavage events induced by nucleases can be used to introduce targeted mutations (deletions, substitutions and insertions) in genomic DNA sequences and as such, can be used as an efficient tool for genome editing in plants including sugar beet and fodder beet.

[0088] In some aspects, the present disclosure relates to a recombinant DNA construct comprising an expression cassette(s) encoding a site-specific nuclease and, optionally, any associated protein(s) to carry out genome modification. These nuclease-expressing cassette(s) may be present in the same molecule or vector as a donor template for templated editing or an expression cassette comprising nucleic acid sequence encoding a PPO protein as described herein or on a separate molecule or vector. Several methods for site-directed integration are known in the art involving different sequence-specific nucleases (or complexes of proteins or guide RNA or both) that cut the genomic DNA to produce a double strand break (DSB) or nick at a desired genomic site or locus. As understood in the art, during the process of repairing the DSB or nick introduced by the nuclease enzyme, the donor template DNA, transgene, or expression cassette may become integrated into the genome at the site of the DSB or nick. The presence of the homology arm(s) in the DNA to be integrated may promote the adoption and targeting of the insertion sequence into the plant genome during the repair process through homologous recombination, although an insertion event may occur through non-homologous end joining (NHEJ).

[0089] In some aspects, the endonuclease is selected from a meganuclease, a zinc-finger nuclease (ZFN), a transcription activator-like effector nucleases (TALEN), an Argonaute (non limiting examples of Argonaute proteins include Thermus thermophilus Argonaute (TtAgo), Pyrococcus furiosus Argonaute (PfAgo), Natronobacterium gregoryi Argonaute (NgAgo), an RNA-guided nuclease, such as a CRISPR associated nuclease (non-limiting examples of CRISPR associated nucleases include Cas1, Cas1B, Cas2, Cas3, Cas4, Cas5, Cas6, Cas7, Cas8, Cas9 (also known as Csn1 and Csx12), Cas12a (also known as Cpf1), Cas1O, Csy1, Csy2, Csy3, Cse1, Cse2, Csc1, Csc2, Csa5, Csn2, Csm2, Csm3, Csm4, Csm5, Csm6, Cmr1, Cmr3, Cmr4, Cmr5, Cmr6, Csb1, Csb2, Csb3, Csx17, Csx14, Csx1O, Csx16, CsaX, Csx3, Csx1, Csx15, Csf1, Csf2, Csf3, Csf4, Cpf1, CasX, CasY, homologs thereof, or modified versions thereof.

[0090] In some aspects, the site-specific genome modification enzyme is a recombinase. Non-limiting examples of recombinases include a tyrosine recombinase attached to a DNA recognition motif provided herein is selected from the group consisting of a Cre recombinase, a Gin recombinase, a Flp recombinase, and a Tnpl recombinase. In some aspects, a Cre recombinase or a Gin recombinase provided herein is tethered to a zinc-finger DNA-binding domain, or a TALE DNA-binding domain, or a Cas9 nuclease. In another aspect, a serine recombinase attached to a DNA recognition motif provided herein is selected from the group consisting of a PhiC3 1 integrase, an R4 integrase, and a TP-901 integrase. In another aspect, a DNA transposase attached to a DNA binding domain provided herein is selected from the group consisting of a TALE-piggyBac and TALE-Mutator.

[0091] In some aspects, plants comprising one or more of the genetic alterations described herein may be selfed or crossed to produce lines that are homozygous for one or more of the genetic alterations described herein. In some aspects, the genetic alterations described herein may be transferred or introgressed to other beet varieties through conventional breeding schemes.

[0092] In some embodiments, the disclosure provides a guide RNA suitable for use in the CRISPR-Cas based genome editing system taught herein, wherein said guide RNA comprises a nucleic acid sequence selected from SEQ ID NOs: 67-80.

[0093] In some embodiments, the disclosure provides a donor DNA suitable for use in the CRISPR-Cas based genome editing system taught herein, wherein said donor DNA comprises a nucleic acid sequence selected from SEQ ID NOs: 48-66 and 90-96.

[0094] In some embodiments, the guide RNA and donor template are provided in a ribonucleoprotein (RNP) complex. In some embodiments, the guide RNA and donor template are provided in a plasmid.

[0095] In some embodiments, a CRISPR-Cas genome editing system comprising; (a) a first expression construct comprising a target locus-specific guide RNA (gRNA) and a donor template, wherein said guide RNA comprises a nucleic acid sequence selected from SEQ ID NOs: 67-80, and wherein said donor template is selected from SEQ ID NOs: 48-66 and 90-96; and (b) a second expression construct comprising a polynucleotide encoding a CRISPR-associated protein nuclease. The CRISPR-Cas based genome editing system comprises at least one gRNA, a donor template, PAM sequence, and CRISPR-associated nuclease selected from the group consisting of Cas9, Cas12, Cas13, CasX, and CasY.

[0096] In some embodiments, RNP or the first expression construct comprises a target locus-specific guide RNA (gRNA) selected from the group consisting of SEQ ID NOs: 69-71, and 74, and a donor template selected from the group consisting of SEQ ID NOs: 52-56, 58-59, 66 and 93.

[0097] In some embodiments, RNP or the first expression construct comprises a target locus-specific guide RNA (gRNA) selected from the group consisting of SEQ ID NOs: 75, 76, and 79, and a donor template selected from the group consisting of SEQ ID NOs: 51, 60, and 63.

[0098] In some embodiments, RNP or the first expression construct comprises a target locus-specific guide RNA (gRNA) selected from the group consisting of SEQ ID NOs: 67, 68, and 73, and a donor template selected from the group consisting of SEQ ID NOs: 62, 64, and 92.

[0099] In some embodiments, RNP or the first expression construct comprises a target locus-specific guide RNA (gRNA) selected from the group consisting of SEQ ID NOs: 80 and 72, and donor template selected from the group consisting of SEQ ID NO: 61, 92, and 95.

[0100] In some embodiments, RNP or the first expression construct comprises a target locus-specific guide RNA (gRNA) selected from the group consisting of SEQ ID NOs: 77 and 78 and a donor template selected from the group consisting of SEQ ID NOs: 48-50, 57, 65, and 96.

[0101] In some embodiments, the genome editing method comprises the steps of: a) transfecting a protoplast obtained from Beta vulgaris cells with a genome editing system to generate a transfected protoplast, wherein the genome editing system comprises: i) a Cas enzyme;

ii) at least one guide RNA (gRNA), wherein the at least one gRNA targets a genomic region corresponding to between position 3653 and 3698 of SEQ ID NO: 1; and iii) at least one single-stranded donor DNA repair template designed to introduce a substitution of arginine at a position corresponding to 126 of SEQ ID NO: 3; b) exposing the transfected protoplast to a selective pressure of at least one herbicide that inhibits protoporphyrinogen oxidase; c) selecting a protoplast comprising a substitution of arginine at a position corresponding to 126 of SEQ ID NO: 3; and d) regenerating a plant from said selected protoplast to produce a Beta vulgaris plant with increased tolerance to an herbicide that inhibits protoporphyrinogen oxidase.

[0102] In some embodiments, the at least one gRNA targets a genomic region corresponding to between position 3679 and 3698 of SEQ ID NO: 1.

### Compositions and Products for Increased Resistance to Herbicide(s)

[0103] In some embodiments, the present disclosure provides a Beta vulgaris plant, or part thereof comprising a nucleic acid encoding a protoporphyrinogen oxidase 2 (PPO2) amino acid sequence. In some embodiments, said PPO2 amino acid sequence comprises a substitution of arginine at a position corresponding to 126 of SEQ ID NO: 3. In further embodiments, the substitution of the amino acid at position 126 of SEQ ID NO: 3 replaces arginine with alanine, glycine, leucine, isoleucine, or methionine. In some embodiments, the substitution replaces arginine with alanine. In some embodiments, the substitution replaces arginine with glycine. In some embodiments, the substitution replaces arginine with leucine. In some embodiments, the substitution replaces arginine with isoleucine. In some embodiments, the substitution replaces arginine with methionine.

[0104] In some embodiments, the Beta vulgaris plant, or part thereof, further comprises a nucleic acid encoding a protoporphyrinogen oxidase 2 (PPO2) amino acid sequence comprising at least one of: (a) an in frame deletion of glycine at a position corresponding to 208 and/or 209 of SEQ ID NO: 3; (b) a substitution of leucine at a position corresponding to 397 of SEQ ID NO: 3; (c) a substitution of glycine at a position corresponding to 398 of SEQ ID NO: 3; and (d) a substitution of phenylalanine at a position corresponding to 420 of SEQ ID NO: 3.

[0105] In some embodiments, leucine at position 397 is replaced with glutamic acid.

[0106] In some embodiments, glycine at position 398 is replaced with alanine.

[0107] In some embodiments, phenylalanine at position 420 is replaced with valine, methionine, isoleucine, or leucine.

[0108] In some embodiments, the disclosure relates to a Beta vulgaris plant, or part thereof, comprising an engineered PPO2 protein having a substitution of arginine corresponding to position number 126 of SEQ ID NO: 3, and at least 90% identical to SEQ ID NO: 9, 12, 15, 18, or 21. In some aspects, the sequence is 91%, 92%, 93%, 94%, 95%, 96%, 97%, 98%, or 99% identical to SEQ ID NO: 9, 12, 15, 18, or 21.

[0109] In other embodiments, the disclosure relates to a Beta vulgaris plant, or part thereof, comprising a nucleic acid encoding a substitution of arginine corresponding to position number 126 of SEQ ID NO: 3, and a nucleic acid at least 90% identical to SEQ ID NO: 7, 10, 13, 16, 19, 44, or 102. In some aspects, the sequence is 91%, 92%, 93%, 94%, 95%, 96%, 97%, 98%, or 99% identical to SEQ ID NO: 7, 10, 13, 16, 19, 44, or 102.

[0110] In other embodiments, the disclosure relates to a Beta vulgaris plant, or part thereof, comprising a nucleic acid encoding a substitution of arginine corresponding to position number 126 of SEQ ID NO: 3, and a nucleic acid at least 90% identical to SEQ ID NO: 8, 11, 14, 17, 20, 45, or 103. In some aspects, the sequence is 91%, 92%, 93%, 94%, 95%, 96%, 97%, 98%, or 99% identical to SEQ ID NO: 8, 10, 14, 17, 20, 45, or 103.

[0111] In some embodiments, the plant, or part thereof, has a herbicide-tolerant protoporphyrinogen oxidase activity.

[0112] In some embodiments, the plant, or part thereof, has increased tolerance to a PPO herbicide when compared to a plant not having the amino acid substitution at a position corresponding to number 126 of SEQ ID NO: 3.

[0113] In some embodiments, the Beta vulgaris plant, or part thereof, is resistant or tolerant to a PPO herbicide selected from the group consisting of: acifluorfen, fomesafen, lactofen, fluoroglycofen-ethyl, oxyfluorfen, flumioxazin, azafenidin, carfentrazone-ethyl, sulfentrazone, fluthiacet-methyl, oxadiargyl, oxadiazon, pyraflufen-ethyl, saflufenacil, trifludimoxazin, and S-3100.

[0114] In some embodiments, the plant is a sugar beet or a fodder beet.

[0115] In some embodiments, the Beta vulgaris plant, or part thereof, further comprises a nucleic acid encoding a protein conferring resistance to a non-PPO herbicide, wherein the protein is 5-enolpyruvulshikimate-3-phosphate synthase (EPSPS) enzyme.

[0116] In some embodiments, the non-PPO herbicide is a glyphosate.

[0117] In some aspects, the glyphosate tolerance is conferred by the H7-1 event described in U.S. Pat. No. 7,335,816 and EP1597373 and obtainable from seed deposited with the NCIMB, Aberdeen (Scotland, U.K.) and having the accession number NCIMB 41158 or NCIMB 41159 or from various commercially available sugar beet varieties (see for example, oecd.org/agriculture/seeds/documents/codes-schemes-list-of-varieties-fodder-beet-and-sugar-beet.pdf, available on the world wide web).

[0118] In some embodiments, the nucleic acid is engineered with a targeted genome editing system, wherein the targeted gene editing system uses a clustered regularly interspaced short palindromic repeats (CRISPR)-Cas nuclease.

[0119] In some embodiments, the disclosure relates to an engineered polynucleotide comprising a nucleic acid sequence encoding a protein with a herbicide-tolerant protoporphyrinogen oxidase (PPO) activity. In some embodiments, the protein comprises at least one amino acid substitution at a position corresponding to 126 of SEQ ID NO: 3. In some aspects, the substitution of the amino acid at position 126 of SEQ ID NO: 3 is selected from the group consisting of: R126A, R126G, R126L, R126I, and R126M.

[0120] In some embodiments, the engineered polynucleotides encode proteins comprising one or more amino acid substitutions at positions corresponding to 126, 397, 398, and 420 of SEQ ID NO: 3. In other embodiments, the recombinant, engineered polynucleotides encodes the proteins further comprising at least one in-frame amino acid deletion at positions corresponding to 208 and/or 209.

[0121] In other embodiments, the disclosure relates to an engineered polypeptide having at least 90%, at least 91%, at least 92%, at least 93%, at least 94%, at least 95%, at least 96%, at least 97%, at least 98%, at least 99% sequence identity to SEQ ID NO: 9, 12, 15, 18, or 21.

[0122] In further embodiments, the disclosure relates to an engineered polynucleotide comprising a nucleic acid sequence having at least 90%, at least 91%, at least 92%, at least 93%, at least 94%, at least 95%, at least 96%, at least 97%, at least 98%, at least 99% sequence identity to SEQ ID NO: 7, 10, 13, 16, 19, 44, or 102.

[0123] In further embodiments, the disclosure relates to an engineered polynucleotide comprising a nucleic acid sequence having at least 90%, at least 91%, at least 92%, at least 93%, at least 94%, at least 95%, at least 96%, at least 97%, at least 98%, at least 99% sequence identity to SEQ ID NO: 8, 11, 14, 17, 20, 45, or 103.

[0124] In some embodiments, the disclosure relates to DNA constructs comprising the engineered nucleotides disclosed herein. In some embodiments, the disclosure relates to methods of producing a plant having resistance to one or more PPO herbicides comprising transforming a plant, or part thereof, with a DNA construct comprising one or more of the engineered guide or donor sequences disclosed herein.

[0125] Once a desired mutation is achieved, one skilled in the art can generate plants having various combinations of mutations in either a heterozygous, homozygous, or combination thereof, of the mutations disclosed herein through traditional breeding methods.

[0126] In some embodiments, the disclosure relates to a Beta vulgaris plant that is homozygous for one or more of the mutations disclosed herein. In some embodiments, the Beta vulgaris plant is heterozygous for one of the mutations disclosed herein. In some embodiments, the Beta vulgaris plant is heterozygous for two or more of the mutations disclosed herein. In some embodiments, the Beta vulgaris plant is homozygous for one or more mutations disclosed herein and also heterozygous for one or more additional mutations disclosed here.

### Methods for Controlling Undesired Plants

[0127] In some embodiments, the present disclosure teaches a method for controlling an undesired plant at a plant (e.g. Beta vulgaris) cultivation site. The method comprises providing a Beta vulgaris plant comprising a nucleic acid encoding an engineered PPO2 protein with herbicide-tolerant protoporphyrinogen oxidase (PPO) activity. In some embodiments, the protein comprises at least one amino acid substitution at a position corresponding to number 126 of SEQ ID NO: 3, wherein the substitution is selected from the group consisting of: R126A, R126G, R126L, R126I, and R126M. The method further comprises applying to the site an effective amount of a PPO herbicide. In some embodiments, the PPO herbicide is selected from the group consisting of: acifluorfen, fomesafen, lactofen, fluoroglycofen-ethyl, oxyfluorfen, flumioxazin, azafenidin, carfentrazone-ethyl, sulfentrazone, fluthiacet-methyl, oxadiargyl, oxadiazon, pyraflufen-ethyl, saflufenacil, trifludimoxazin, and S-3100.

[0128] In some embodiments, the Beta vulgaris plant comprising a nucleic acid encoding an engineered PPO2 protein further comprises in cis or in trans at least one of (a) in frame deletion of glycine at a position corresponding to 208 and/or 209 of SEQ ID NO: 3; (b) a substitution of leucine at a position corresponding to 397 of SEQ ID NO: 3; (c) a substitution of glycine at a position corresponding to 398 of SEQ ID NO: 3; and (d) a substitution of phenylalanine at a position corresponding to 420 of SEQ ID NO: 3.

[0129] In some embodiments, leucine at the position 397 is replaced with glutamic acid.

[0130] In some embodiments, glycine at the position 398 is replaced with alanine.

[0131] In some embodiments, phenylalanine at the position 420 is replaced with valine, methionine, isoleucine, and leucine.

[0132] In some embodiments, the disclosure relates to a method of producing a plant, plant part, or plant cell having resistance or tolerance to a PPO herbicide, the method comprising: transforming a plant, plant part, or plant cell with the recombinant, engineered polynucleotide taught herein. In some embodiments, the method comprises transforming the plant with one or more RNPs comprising a guide RNA and donor template described herein. In some embodiments, the method comprises transforming a plant with a DNA construct comprising a guide RNA and donor template described herein.

[0133] In some embodiments, the disclosure relates to a method for conferring PPO herbicide tolerance to a Beta vulgaris plant, part, or cell thereof comprising: expressing in said plant, part, or cell thereof the recombinant, engineered polynucleotide taught herein.

[0134] In some embodiments, the herbicide tolerance is to at least one PPO herbicide selected from the group consisting of: acifluorfen, fomesafen, lactofen, fluoroglycofen-ethyl, oxyfluorfen, flumioxazin, azafenidin, carfentrazone-ethyl, sulfentrazone, fluthiacet-methyl, oxadiargyl, oxadiazon, pyraflufen-ethyl, saflufenacil, trifludimoxazin, and S-3100.

[0135] In some embodiments, the plant, plant part, or plant cell is transformed with one or more additional desired traits. In some aspects, the one or more additional desired traits are introduced via a transgene. In some aspects, the one or more additional desired traits are introduced by direct or random mutagenesis. In some aspects, the one or more desired traits is introduced by introgression by one or more plant breeding techniques.

[0136] In some embodiments, the plant breeding techniques are selected from the group consisting of recurrent selection, mass selection, hybridization, open-pollination, backcrossing, pedigree breeding, mutation breeding, haploid/double haploid production, and marker enhanced selection. In some embodiments, the plant breeding technique is mutation breeding and the mutation selected is spontaneous or artificially induced.

[0137] In some embodiments, the one or more additional desired traits is resistance to a non-PPO herbicide. In some embodiments, the method of producing a plant tolerant to a PPO herbicide and at least one other herbicide comprises: a) obtaining a plant having an engineered PPO; b) crossing the plant with a second plant comprising tolerance to the at least one other herbicide, and c) selecting a progeny plant resulting from said crossing that comprises tolerance to a PPO herbicide and the at least one other herbicide.

### EXAMPLES

### Example 1: Generation of Sugar Beet Plants Having the R126L Mutation

[0138] For editing the sugar beet PPO2 gene, RNPs and donor templates were introduced into stomatal guard cell protoplasts isolated from well regenerating sugar beet genotype by means well known in the art (see for example, International Patent Publication WO/1995/010178). Components for RNPs and single strand HDR (ssHDR) donor template (SEQ ID NO:58) were synthesized from Integrated DNA Technologies. In addition to introducing a point mutation causing a substitution at R126 of SEQ ID NO: 3, the donor template can further include modifications of the PAM site (from TTTG to TCTG, SEQ ID NO: 93) to prevent additional cuts. The RNPs were produced by assembling purified nuclease (S.p. Cas9 or A.s.Cas12a) and guide RNA (sgRNA or crRNA) for 10 minutes at 27° C. in a ratio 1/6. For generation of the R126L mutation gRNA SEQ ID NO:71 for Cas9 and SEQ ID NO:69 for Cpf1 enzymes were used.

[0139] Protoplasts were transfected with RNPs following a classical Polyethylene Glycol (PEG) transfection protocol (Hall, R. D., et al., 1996. A high efficiency technique for the generation of transgenic sugar beets from stomatal guard cells. Nature Biotechnology 14:1133-1138). Protoplasts were then cultured on solid medium (polymer-containing medium, such as alginate or agarose-like containing medium), leading to the formation of microcalli. Screening for resistance to PPO herbicides has been done at several different time points.

[0140] In some experiments, exposure of calli to different concentrations of PPO inhibitors such as saflufenacil (SAF) at a concentration that is lethal to more than 99% of the cells enabled the selection of mutated cells being resistant to this herbicide molecule. For this, protoplasts were transferred on solid culture medium in the dark with addition after one week of culture of 10 μM Saflufenacil (SAF). SAF in dark conditions should not show any toxicity effect. Emerging calli were then selected and transferred to light conditions on medium containing 0.75 μM SAF, or SAF at a concentration at which wild-type calli are very sensitive. Thus, surviving calli would likely exhibit good resistance to PPO inhibitors. Additionally, the surviving calli may show somatic embryogenesis and will regenerate into sugar beet plantlets.

[0141] In other experiments, different SAF concentrations were used throughout the regeneration. In one part of the experiment above, protoplasts were transferred to solid culture medium with addition after one week of culture of 10-25 μM Saflufenacil (SAF). Emerging calli were selected and transferred to light conditions on medium with 0.75 μM SAF. After two weeks of growth, calli were transferred to regeneration medium containing 0.05 μM SAF for 4 weeks. SAF is then removed from the media. In another part of the experiments, SAF (0.2 μM or 0.5 μM) is only applied to the media for regenerating calli, this under light conditions approximately seven weeks after protoplast isolation.

[0142] In other experiments, friable calluses are isolated from explants created by the methods disclosed herein using a sterile scalpel and transferred to petri dishes containing solid PCM Simultaneously, the same can be done for friable calluses carrying the wild type allele of the PPO2 gene. After three weeks, the calluses are cut in half using a sterile scalpel and one half is transferred to a new petri dish containing solid PCM media supplemented with 500 mg/l claforan, while the other one is transferred to PCM media supplemented with 0.7872 mg/l lactofen and 500 mg/l claforan. The plates are scored for difference in phenotype weekly for 8 weeks, with the calluses being transferred to fresh plates every second week.

[0143] In other experiments, screening for resistance to PPO herbicides was done on 25 regenerated sugar beet plants obtained after transfection of guard cell protoplasts by growing these plants (8 clones or copies per plant) on media containing SAF at a concentration of 2.5 μM. Visual observation of growth was done after 20 to 28 days. Plants were scored visually according to their growth, and marked “OK” for plants showing growth, “Bit growth” for plants showing limited growth, “No” for plants showing no growth, or “Dead” for plants that were dead after SAF exposure. The concentration of SAF used in this screen was identified as impacting severely on regenerated wild-type plants obtained after protoplast isolation and regeneration from the sugar beet genotype, from which guard cell protoplasts are isolated for transfection. Given the severe growth retardation and in some cases lethal effect of this SAF concentration on the wild-type genotype, edited plants scored as “OK” and “Bit growth”, showed a good level of SAF tolerance and were selected for rooting.

[0144] FIGS. 4A-4D shows 8 copies of two different edited sugar beet genotypes, HTC013—shown in FIG. 4A and HTC015—shown in FIG. 4B, with the expected mutation (R126L) on SAF 2.5 μM containing media after 20 days. Wild-type genotypes are shown in FIG. 4C and FIG. 4D. Clear differences in growth, and plant development can be observed between the edited and wild-type plants on this media.

[0145] To confirm the targeted mutagenesis can be achieved; a preliminary experiment was set up to estimate the percentage of targeted mutation. About 1 million protoplasts were transfected with selected guides and donor templates for each of the targeted mutations. After incubation for 1 day at 28° C., DNA was extracted from the pool of 1 million guard cell protoplasts. Deep sequencing analysis was performed (Illumina NextSeq) on amplicons of 350 to 450 bp covering the targeted mutations. Reads were mapped to the publicly available sugar beet reference genome EL10_1.0 (McGrath et al, 2020. A contiguous de novo genome assembly of sugar beet EL10 (Beta vulgaris L.) bioRxiv), and variants were identified based on comparison to the reference sequence. For each of the amplicons, the frequency showing the expected edit (HDR), and the frequency showing another type of mutation (INDEL) is given in Table 4 below. Percentages were averaged over two replicates (independent transfections).

TABLE 4
Percentage of reads showing the expected mutation (HDR)
or another edit (INDEL) at position 126

| | Amino Acid | | |
|---|---|---|---|
| | position of mutation | % HDR PPLs (n = 2) | % indels PPLs (n = 2) |
| Cas9 | R126 | 0.16 | 9.6 |
| | G209del | 0.91 | 8.6 |
| | G398 | 0.16 | 12 |
| | L397-F420 | 0.02 | 21 |
| Cpf1 | R126 | 1.25 | 1.4 |
| | G209del | 1.6 | 2.2 |
| | G398 | 0.14 | 5.2 |
| | L397-F420 | 0.009 | 2.9 |

[0146] Overall, for obtaining sugar beet plants showing the expected substitution mutation at position 126 approximately 30 million protoplasts were isolated and transfected (roughly 1 million protoplasts per experiment are used for combining various gRNAs and Cas enzymes) by the inventors. Close to 20,000 calli were selected for culturing, and from these approximately 150 sugar beet plantlets were regenerated.

### Example 2: Screening Sugar Beet Plantlets Carrying the R126L Mutation

[0147] To check for the presence of the expected mutation in regenerated plants KASP assays were developed and used for screening. Leaf samples were collected from the regenerated plants and analyzed for the presence of the expected mutations using KASP analysis (LGC Genomics). Mutations indicated by KASP were then confirmed using Sanger sequencing analysis. Table 5 lists the primer sequences used in KASP analysis for detecting the R126L mutation, and the primers used for Sanger sequencing. Chromatograms were visually analyzed to identify the expected mutation; an estimation of the frequency of the edits was performed using the ICE (Inference of CRISPR Edits) algorithm (Conant et al, 2022. Inference of CRISPR Edits from Sanger Trace Data. The CRISPR Journal 2:123-130).

TABLE 5
Primers of KASP assays, and Sanger sequencing used for the detection of HDR in the edited sugar
beet plants

| KASP | | | | |
|---|---|---|---|---|
| markers | Target | Primer_AlleleX | Primer_AlleleY | Primer Common |
| HTC- | R126 | SEQ ID NO: 81- | SEQ ID NO: 83- | SEQ ID NO: 87- |
| HTG_S01 | region | GAAGGTGACCAAGTT | GAAGGTCGGAGTCAA | CTCTGTC |
| | | CATGCTACGACCGTCTCTCGCAATGT | CGGATTCGACCGTCTCTCGCAATGTA | ATAGCCAATTGCACAAA |
| | | ATA | TC | ACAAA |
| HTC- | R126 | SEQ ID NO: 81- | SEQ ID NO: 83- | SEQ ID NO: 88- |
| HTG_S02 | region | GAAGGTGACCAAGTT | GAAGGTCGGAGTCAA | TAATTG |
| | | CATGCTACGACCGTCTCTCGCAATGT | CGGATTCGACCGTCTCTCGCAATGTA | CCTTTTCTTTCTAGATGG |
| | | ATA | TC | CTTCAT |
| HTC- | R126 | SEQ ID NO: 82- | SEQ ID NO: 84- | SEQ ID NO: 89- |
| HTG_S03 | region | GAAGGTGACCAAGT | GAAGGTCGGAGTCA | CATGTTT |
| | | TCATGCTGTCATAGCCAATTGCACAA | ACGGATTCTGTCATAGCCAATTGCAC | CCAGGCTCCAGAGTTGAA |
| | | AACAAAT | AAAACAAAA | |
| HTC- | R126 | SEQ ID NO: 109- | SEQ ID NO: 110- | SEQ ID NO: 111- |
| HTG_S04 | region | GAAGGTGACCAAGTTCATGCTCATAGCC | GAAGGTCGGAGTCAACGGATTCTGTCAT | CATGTTTCCAGGCTCCAGAG |
| | | AATCGCGCAGAACAAAT | AGCCAATTGCACAAAACAAAA | TTGAA |
| SANGER | | | | |
| primers | Target | Orientation | Sequence | |
| HTC- | R126 | forward | SEQ ID NO: 85-GGGCTTCGTGAGA | |
| HTG_698 | region | | AGCAGCAGTTTGTAAG | |
| HTC- | R126 | reverse | SEQ ID NO: 86-GCGCTGAAAGGATA | |
| HTG_699 | region | | TTGCTCTTGAGAAG | |

[0148] FIG. 3 shows a chromatogram obtained after Sanger sequencing of edited plant HTC018. The inventors identified 8 plants showing the expected mutation, demonstrating the efficiency of the transfection method used on guard cell protoplasts (8.6%). In all edited plants showing the expected mutation, it was combined with either a wild-type sequence, or a differently edited allele.

### Example 3: In Planta Screening for Resistance to PPO Herbicides

[0149] In order to establish a baseline of the native PPO herbicide tolerance among the non-edited sugar beet lines, LD50 (lowest dose where no more than 50% seedlings show moderate levels of herbicide toxicity) and LD100 (lowest dose that is lethal for all tested seedlings) was determined in the following way: individuals from each inbred line were germinated in soil in the greenhouse under artificial light (20 hours) at 20/15° C. temperature day/night respectively. Fourteen days after seedling emergence, the seedlings were sprayed with a specified dose of active compounds from mixtures containing PPO targeting herbicide compounds. The seedlings were scored for survival one, two and three weeks after spraying. The same setup was repeated for all sugar beet lines, doses and mixtures. In total 5 different elite sugar beet lines were tested for native PPO herbicide tolerance using this protocol.

[0150] Edited lines of sugar beet at the TO stage (first plants after nucleotide changes have been introduced) carrying the edited gene in homozygous or heterozygous hemizygous state are demonstrated to be tolerant against the PPO targeting herbicide if they do not show any signs of growth retardation, loss of chlorophyll or other visual signs of damage, or if the damage is very limited compared to wild-type plants, not edited.

[0151] In other experiments, plants carrying the mutation R126L described below in Table 6 were acclimatized in soil for 3-5 weeks and screened for PPO resistance with a spray test of the PPO herbicides Saflufenacil (Brand name TREEVIX at a recommended dose of 200 g a.i./ha), Pyraflufen-ethyl (Brand name EVOLUTION at a recommended dose of 0.8l/ha, or a.i. 26.5 g/l) Saflufenacil (pure compound Sigma at a recommended dose of 200 g a.i./ha). The spray was performed at a concentration of 0.5× and 1× of the recommended dose for Saflufenacil), and 0.2× for Pyraflufen-ethyl). The pure chemical compound SAF used on the regenerated plants in vitro was also used in this screen at 1× recommended dose of 200 g ai/Ha. Water treatment was included as a control. Five different sugar beet plants (HTC001, HTC002, HTC003, HTC013, HTC024) carrying edits at the position 126, from which 3 showed the expected substitution R to L at position 126 (HTC003, HTC013, HTC024), were used in one experiment. In another experiment 13 different sugar beet plants (HTC007, HTC009, HTC012, HTC014, HTC015, HTC016, HTC017, HTC018, HTC021, HTC023, HTC028, HTC046, HTC056) carrying edits, from which 5 showed the expected substitution R to L at position 126 (HTC007, HTC015, HTC018, HTC046, HTC056) were used. In both experiments each sugar beet plant was multiplied in vitro as to include a total of minimum 4 clones or replicates of each edited sugar beet plant per herbicide treatment. A subset of these treated plants is shown in FIGS. 5A and 5B. The phytotoxicity effect of PPO inhibiting herbicides was measured in mutated sugar beet plants (on a set of minimum 4 clones per edited sugar beet plant) based on a scale from 0% to 100%, or 1 to 5, (i.e. 0% or 1 being no damage/no phytotoxicity observed and 100% or 5, being all plants were completely damaged or killed,) compared to wild-type plants. Plants were scored 3, 6, 9, 13, 16, 20 and 27 Days after spray test.

[0152] Table 6 shows scores from 1 to 5 (healthy to damaged, based on phytotoxicity) on sugar beet plants edited at position 126, 17 days after spraying with pyraflufen-ethyl herbicide (Evolution 0.2× of the recommended dose corresponding to 0.8 l/ha, or a.i. 26.5 g/l), saflufenacil herbicides (Treevix 0.5× and 1×, 100 g a.i./ha and 200 g a.i./ha respectively), and saflufenacil pure active ingredient (Sigma) (SAF 1×, or 200 g a.i./ha). No score is provided when the plant has not been tested, noted as NT in the table (not tested). Water treatment was included when enough plants were available. At least 4 copies per edited plant were sprayed. Scores were given on group of 4 copies per edited plant. HDR=edited plant showing the expected mutation R to L at position 126, INDEL=edited plant showing another type of edit than the expected mutation.

TABLE 6
Resistance to PPO targeting herbicides

| | | | | | | Ctrl |
|---|---|---|---|---|---|---|
| | | Evolution | SAF | Treevix | Treevix | (water |
| Events | HDR/INDEL | 0.2X | 1X | 1X | 0.5X | treated) |
| HTC001 | INDEL | 2 | 5 | 5 | NT | NT |
| HTC002 | INDEL | 2 | 4 | 5 | NT | NT |
| HTC003 | HDR | NT | 4 | 3 | NT | NT |
| HTC005 | Ctrl | NT | 5 | 4 | NT | NT |
| HTC006 | INDEL | NT | NT | 5 | NT | NT |
| HTC013 | HDR | NT | 2 | 4 | NT | NT |
| HTC024 | HDR | 2 | 4 | 5 | NT | NT |
| HTC025 | HDR | NT | NT | 4 | NT | NT |
| HTC007 | HDR | 2 | 3 | 3 | 3 | 1 |
| HTC009 | INDEL | 3 | 4 | 4 | 3 | 1 |
| HTC012 | INDEL | 3 | 4 | 4 | 3 | 1 |
| HTC014 | INDEL | 2 | 4 | 4 | 3 | 1 |
| HTC015 | HDR | 2 | 3 | 4 | 3 | 1 |
| HTC016 | INDEL | 2 | 4 | 4 | 4 | 1 |
| HTC017 | INDEL | 2 | 4 | 4 | 4 | 1 |
| HTC018 | HDR | 1 | 2 | 3 | 2 | 1 |
| HTC021 | INDEL | 3 | 5 | 5 | 4 | 1 |
| HTC023 | INDEL | 2 | 2 | 2 | 2 | 1 |
| HTC028 | INDEL | 2 | 4 | 4 | 3 | 1 |
| HTC046 | HDR | 1 | 2 | 3 | 2 | 1 |
| HTC056 | HDR | 2 | 4 | 4 | 3 | 1 |
| B8M52 | Ctrl | 5 | 5 | 5 | 4 | 1 |

[0153] At the T1 stage (one generation after seed production), the edited lines are phenotypically evaluated for agronomically valuable traits. This is done by sowing seeds from each individual event in soil in the greenhouse under artificial light (20 hours) at 20/15° C. temperature day/night respectively, and continuously monitoring their development. At 14 days after sowing or at 3-4 leaf stage, seedlings will be sprayed with several commercially available PPO herbicides at several dose rates to evaluate the tolerance level of obtained mutations. The traits that will be analyzed include, but are not limited to, germination frequency, germination rate, seedling development, photosynthetic activity, root development, shoot growth rate, sugar content, root yield and time to flowering. The corresponding non-edited lines (isogenic lines) will be used as controls.

### Example 4: Genetically Engineering the Endogenous Sugar Beet PPO2 Gene

[0154] Sequence analysis of PPO2 of four different sugar beet genotypes showed the absence of any polymorphism on the protein level (two public ref genomes, two proprietary ref genomes). Potential mutations that may convey resistance to PPO herbicides were identified and are shown below in Table 7.

[0155] In addition to the R126L plants described above, single edits at amino acid position 126, wherein arginine is substituted for alanine, glycine, isoleucine, or methionine may also be generated. Plants may further comprise additional edits as described in Table 7 below at positions 208, 209, 397/420, 398, and 420 in the PPO2 gene (Butterfass chromosome 9) of sugar beet (Beta vulgaris L.).

TABLE 7
Example amino acids subsitutions in the sugar beet PPO2 sequence

| Position | | | Possible | |
|---|---|---|---|---|
| in SEQ ID | Example | Type of | nucleotide | Example Donor |
| NO: 3 | sgRNA | mutation | change | DNA |
| 126 | SEQ ID NO: 69 | Arg-Ala | AGA to GCT, GCC, | SEQ ID NO: 52 |
| | SEQ ID NO: 70 | | GCA, or GCG | |
| | SEQ ID NO: 71 | Arg-Gly | AGA to GGT, GGC, | SEQ ID NO: 53 |
| | | | GGA, or GGG | |
| | SEQ ID NO: 74 | Arg-Leu | AGA to TTA, TTG, | SEQ ID NO: 54 |
| | | | | SEQ ID NO: 58 |
| | | | | SEQ ID NO: 59 |
| | | | CTT, CTC, CTA, or | SEQ ID NO: 66 |
| | | | CTG | SEQ ID NO: 93 |
| | | Arg-Ile | AGA to ATT, ATC, | SEQ ID NO: 55 |
| | | | or ATA | |
| | | Arg-Met | AGA to ATG | SEQ ID NO: 56 |
| 208 | SEQ ID NO: 75 | Gly deletion | Deletion of GGA | SEQ ID NO: 51 |
| | SEQ ID NO: 76 | | | SEQ ID NO: 60 |
| | SEQ ID NO: 79 | | | SEQ ID NO: 63 |
| 209 | SEQ ID NO: 75 | Gly deletion | Deletion of GGA | SEQ ID NO: 51 |
| | | | | SEQ ID NO: 60 |
| | SEQ ID NO: 76 | | | SEQ ID NO: 63 |
| | SEQ ID NO: 79 | | | SEQ ID NO: 90 |
| | | | | SEQ ID NO: 94 |
| 397/420 | SEQ ID NO: 67 | Leu-Glu at | CTC to GAG or | SEQ ID NO: 62 |
| | SEQ ID NO: 68 | 397 | GAA | SEQ ID NO: 64 |
| | SEQ ID NO: 73 | Phe-Val at | TTT to GTT, GTC, | SEQ ID NO: 92 |
| | | 420 | GTA, or GTG | |
| 398 | SEQ ID NO: 72 | Gly-Ala | GGT to GCT, GCC, | SEQ ID NO: 61 |
| | | | | SEQ ID NO: 92 |
| | SEQ ID NO: 80 | | GCA, or GCG | SEQ ID NO: 95 |
| 420 | SEQ ID NO: 77 | Phe-Val | TTT to GTT, GTC, | SEQ ID NO: 57 |
| | | | GTA, or GTG | SEQ ID NO: 96 |
| | SEQ ID NO: 78 | Phe-Met | TTT to ATG | SEQ ID NO: 48 |
| | | Phe-Ile | TTT to ATT, ATC, | SEQ ID NO: 49 |
| | | | or ATA | |
| | | Phe-Leu | TTT to TTA, TTG, | SEQ ID NO: 50 |
| | | | CTT, CTC, CTA, or | |
| | | | CTG | SEQ ID NO: 65 |

[0156] Mutations at the positions shown above may be obtained individually or introduced simultaneously. Genomic edits may be achieved by any means known in the art, for example, by CRISPR. Delivery of CRISPR-Cas RNPs (Ribonucleoprotein comprised of sgRNA+endonuclease protein) to sugar beet protoplasts targeting the gene encoding protoporphyrinogen oxidase (PPO2) can be directly implemented using previously developed protoplast isolation, transfection and regeneration protocols. Example sgRNAs are provided in SEQ ID NO: 69, SEQ ID NO: 70, SEQ ID NO: 71, and SEQ ID NO: 74. Example donor DNA sequences for the amino acid substitution at position 126 are provided in SEQ ID NO: 52 (R126A), SEQ ID NO: 53 (R126G), SEQ ID NOs: 54, 58, 59, 66 (R126L), SEQ ID NO: 55 (R126I) and SEQ ID NO: 56 (R126M) (see also Table 4 above).

[0157] Additional sgRNAs and donor DNAs for a deletion of the 208^{th} and/or 209^{th} amino acid, substitutions of the 397^{th} and 420^{th} amino acids, a substitution of the 398^{th} amino acid, or a substitution of the 420^{th} amino acid of sugar beet PPO2 are also shown above in Table 7. After induced DNA cleavage these mutations are integrated through HDR in the PPO2 gene in sugar beet.

[0158] For example, one may use HDR, using Cas9 or Cas12a (Cpf1) enzymes and their respective donor DNA templates, for all the above-mentioned positions in Table 7. For the simultaneous introduction of the mutations (for example at positions 397 and 420), one would ideally use two guide RNA sequences in combination with one DNA repair template. However, for Cas12a guide RNA design was not possible at position 397 because of the absence of a PAM site close by, which might reduce the chances of achieving the combined mutation at 397 and 420 (397-420) when using Cas12a. Only one guide RNA was consequently designed to be used at position 420. For Cas9, guide RNAs could be designed at both 397 and 420, which increases the success to obtain the combined mutation through HDR.

### Example 5: Transformation with Plasmids and Regeneration of Sugar Beet from Leaf Tissue

[0159] Seeds from sugar beet cultivars will be sterilized by submersion in 70% hypochlorite solution for 15 minutes before being rinsed in 3 volumes of sterile water. After removing the water, the seeds will be submerged in 70% ethanol for 12 hours before being spread out on filter paper to dry completely. When the seeds are completely dry, they will be sown in sterile plant tissue jars containing half-strength Murashige and Skoog (MS) (Murashige and Skoog, 1962 “A Revised Medium for Rapid Growth and Bio Assays with Tobacco Tissue Cultures”. Physiologia Plantarum 15 (3): sid. 473-497) media with 3% sucrose and allowed to germinate in an in-vitro chamber supplemented with artificial lights (200 μmol/m²/s, 18 hours, 22° C.). For transformation, Agrobacterium tumefaciens carrying the relevant constructs will be grown in liquid LB supplemented with relevant antibiotics until the cultures are in the exponential growth phase at which acetosyringone (Sigma-Aldrich, Saint Louis, MO, U.S.) to a final concentration of 100 μM will be added. One hour later, the cells will be harvested using gentle centrifugation and resuspended in co-cultivation buffer (5 mM 4-Morpholineethanesulfonic acid (Sigma-Aldrich, Saint Louis, MO, U.S.), 5 mM MgSO4 (Sigma-Aldrich, Saint Louis, MO, U.S.), pH 5.7, 100 μM acetosyringone (Sigma-Aldrich, Saint Louis, MO, U.S.)) to a final OD₆₀₀ of 0.2 to form the co-cultivation media.

[0160] After this, 1-2 mm wide and 5-15 mm long pieces of leaf from the sugar beet cultivars will be cut and immediately placed in petri dishes containing the co-cultivation media with abaxial side up. The leaf surface can be gently scarred using a sterile scalpel. After 1 minutes, the leaf tissue can be transferred to a solid co-cultivation media (1/10 MS, 3% sucrose ((Sigma-Aldrich, Saint Louis, MO, U.S.), pH 5.7) and cultivated in darkness for 3 days at 22° C. before being transferred to light conditions (200 μmol/m²/s, 18 hours). After two weeks, the transformed leaf tissue will be transferred to selection media (1/2 MS, 2% sucrose, 500 mg/l claforan (Sigma-Aldrich, Saint Louis, MO, U.S.), 0.25 mg/l 6-Benzylaminopurine (Sigma-Aldrich, Saint Louis, MO, U.S.), 0.05 mg/l 1-Naphthaleneacetic acid (Sigma-Aldrich, Saint Louis, MO, U.S.), 0.7872 mg/l lactofen (Sigma-Aldrich, Saint Louis, MO, U.S.) and 100 mg/l kanamycin (Sigma-Aldrich, Saint Louis, MO, U.S.)).

[0161] Generated shoots will be continuously removed and transferred to rooting media (1/2 MS, 2% sucrose, 10 mg/l Indole-3-butyric acid (Sigma-Aldrich, Saint Louis, MO, U.S.), 0.7872 mg/l lactofen and 500 mg/l claforan) until proper rooting has taken place, upon which the plants will be transferred to soil.

### Example 6: Transformation with Plasmids and Regeneration of Sugar Beet from Leaf Base Protoplasts

[0162] Seeds from cultivars of sugar beets can be sterilized and grown as described in Example 5 above. Approximately three weeks after germination, leaf material may be harvested by removing the top ⅔ portion of the leaf as well as the middle stem before cutting the remaining tissue into 1 mm wide and 15 mm long pieces using a sterile scalpel. The tissue is then immediately placed in a sterile 15 ml centrifuge tube with 5 ml PCWS and incubated in the dark at room temperature. After one hour, the PCWS is removed using a sterile pasteur pipette and the weight of the tissue determined. The tissue will then be transferred to a sterile petri dish and 5 ml of DCWS added for each gram of tissue, gently stirred and incubated in darkness at 22° C. for 18 hours. After incubation, the material is again gently stirred before being filtrated into a sterile 15 ml centrifuge tube through a 100 μm mesh to remove larger debris and centrifuged at 100×g for 10 minutes. The supernatant will be decanted and the remaining pellet resuspended in 15 ml PCWS. The protoplast suspension is then centrifuged 100×g for 10 minutes and the resulting band of protoplasts are extracted using a sterile pasteur pipette and resuspended in an equal volume of WCWS and centrifuged at 100×g for 10 minutes to wash the protoplasts. This washing can be repeated three times.

[0163] For PEG-mediated transformation of the isolated protoplasts, the protoplasts are washed using 0.45 M mannitol solution, and resuspended in one ml of transfection solution (015 mM MgCl₂·2H₂O, 0.45 M Mannitol, 10 mM 4-Morpholineethanesulfonic acid, pH 5.7). Protoplast concentration can be determined using a hematocytometer and the suspension diluted to a final concentration of 4×10⁵ cells/ml. For the transfection, 10 μg plasmid/4×10⁵ cells are carefully added to the protoplast suspension and the solution is gently mixed for three minutes before adding an equal volume of 40% PEG-solution very carefully. After 15 minutes, 3 ml of 0.45 M mannitol solution is added dropwise, the suspension centrifuged at 100×g for 10 minutes to collect the protoplasts and the supernatant decanted. The protoplasts are then embedded in alginate using a modified protocol from Damm et al. (1989) (“Regeneration of fertile plants from protoplasts of different Arabidopsis thaliana genotypes” Molecular and General Genetics 213:15-20) in which the protoplasts first are suspended in alginate by mixing the protoplasts suspension with an equal volume of sodium alginate solution (2.8% sodium alginate (Sigma-Aldrich, Saint Louis, MO, U.S.) and 0.4 M mannitol). The suspension is then spread unto a solid agar medium containing 40 mM of CaCl₂). After one hour at room temperature the solidified discs containing the protoplasts will be transferred to a protoplast regeneration media (PRGM). After several weeks, friable microcalluses will be transferred to shoot inducing media.

### Example 7: Non-Transgenic Gene Editing with Cpf1

[0164] To achieve the above described edits in the sugar beet PPO gene, a protoplast based system can be utilized in such a way that the resulting edited individuals do not contain any transgenic regions.

[0165] First, sgRNA sequences comprising SEQ ID NOs: 70, 74, 75, 76, 77 and 78 can be cloned into a plant Cpf1-sgRNA expression vector downstream a CaMV 35S promoter. (1) Two sgRNAs (SEQ ID NOs: 70 and 74) are used for substitutions of Arg (R) to Ala (A), Gly (G), Leu (L), Ile (I), or Met (M) at position 126. (2) Two sgRNAs (SEQ ID NOs: 75 and 76) are used for deletion of Gly (G) at position 208 or 209. (3) Two sgRNAs (SEQ ID NOs: 77 and 78) are used for substitutions of Phe (F) to Val (V), Met (M), Ile (I) or Leu (L) at position 420.

[0166] The vector may also contain a codon-optimized Cpf1, SEQ ID NO: 34, under regulatory control of a CaMV 35S promoter. In parallel, the donor sequence comprising of SEQ ID NOs: 51 (for deletion of G at 209), 52-56 and 58 (for substitutions of R to A, G, L, I and M at 126), and 57, 48-50 (for substitutions of F to V, M, I and L at 420) are individually cloned into a donor vector. The Cpf1-sgRNA vector and one of the donor vectors are then transformed into sugar beet protoplasts isolated from each cultivar in the same way as described above using 10 μg of each plasmid. An aliquot of the transformed protoplasts is taken immediately before fixation in alginate and analyzed for efficiency using NGS. >1% of correct sequences is required for continued work. Once shoots have been formed, a tissue sample is taken and analyzed using Sanger sequencing for targeted mutations and for PCR-evaluation of transgene insertions. Only plants showing positive results for the targeted mutation and no transgene insert are transferred to the rooting step described above.

### Example 8: Gene Editing with Cpf1 Using a Transient Expression System

[0167] Another way of achieving the above-described edits in the sugar beet PPO gene in such a way that the resulting edited individuals do not contain any transgenic regions is by using Agrobacterium-mediated transient expression. A vector as described above in Example 7 is generated containing an additional bacterial resistance marker gene cassette (kanamycin). In parallel, the donor sequence comprising of SEQ ID NOs: 51 (for deletion of G at 209), 52-56 and 58 (for substitutions of R to A, G, L, I and M at 126), and 57, 48-50 (for substitutions of F to V, M, I and L at 420 are individually cloned into a donor vectors containing a bacterial resistance marker gene cassette (spectinomycin).

[0168] These binary plasmids coding for planta expression of Cpf1 and the relevant guide-RNA/donor region are co-transformed into Agrobacterium rhizogenes K599 using electroporation. The A. rhizogenes are then grown in liquid LB supplemented with relevant antibiotics until the cultures are in the exponential growth phase at which acetosyringone to a final concentration of 100 μM is added. One hour later, the cells are harvested using centrifugation, resuspended in infection buffer (5 mM 4-Morpholineethanesulfonic acid, 5 mM MgSO4, pH 5.7, 100 μM acetosyringone) for a final OD₆₀₀ of 0.2 and then infiltrated into the lower part of the hypocotyl in young sugar beet seedlings. Hairy roots forming from the infected sites are then collected and placed onto solid media containing ½ MS supplemented with 200 mg/l claforan and 50 mg/l kanamycin. After two weeks, surviving tissue is screened for presence of target mutation and transgene inserts using sanger sequencing and fragment length PCR. Once positive tissue has been determined, it is transferred to shoot inducing media followed by root inducing media, using 0.7872 mg/l lactofen as selective agent for PPO herbicide resistance.

### Example 9: Gene Editing with Biolistic Transformation

[0169] Another way of achieving the targeted edits shown in Table 7 is through biolistic transformation of sugar beet calli. In this method, two different plasmids carrying and expressing in planta the Cpf1 and gRNA/complementary region respectively. Mixed in a 1:1 ratio, particle bombardment can be performed using a particle bombardment system (e.g. a Bio-Rad PDS1000/He at a target distance of 60 mm and at helium pressure 1100 psi) to introduce the plasmids into 1 month old calli. After 48 h aliquots can be taken to verify the efficiency of the method using PCR or NGS-based methods. Once efficiency has been determined, protoplasts are transferred to solid cultivation media that may or may not contain a PPO targeting herbicide. Regenerated plants are screened for the relevant edit using PCR or NGS-based approaches.

[0170] Table 8 below lists the expected genomic, cDNA, and protein sequences of lines generated carrying various mutations disclosed herein.

TABLE 8
Summary of Sequence Information

| | Sequence | | | |
|---|---|---|---|---|
| SEQ ID NO. | Type | Origin | Brief Description | Length |
| SEQ_ID_NO: 1 | DNA | Beta | Genomic DNA sequence of wild type Beta | 37009 |
| | | vulgaris | vulgaris PPO2 | |
| SEQ_ID_NO: 2 | cDNA | Beta | cDNA sequence of wild type Beta vulgaris PPO2 | 1575 |
| | | vulgaris | | |
| SEQ_ID_NO: 3 | protein | Beta | Protein sequence of wild type Beta vulgaris | 524 |
| | | vulgaris | PPO2 | |
| SEQ_ID_NO: 4 | DNA | Beta | Genomic DNA sequence of dG209 or dG208 | 36493 |
| | | vulgaris | mutant of Beta vulgaris PPO2 | |
| SEQ_ID_NO: 5 | cDNA | Beta | cDNA sequence of dG209 or dG208 mutant of | 1572 |
| | | vulgaris | Beta vulgaris PPO2 | |
| SEQ_ID_NO: 6 | protein | Beta | Protein sequence of dG209 or dG208 mutant of | 523 |
| | | vulgaris | Beta vulgaris PPO2 | |
| SEQ_ID_NO: 7 | DNA | Beta | Genomic DNA sequence of R126A mutant of | 37009 |
| | | vulgaris | Beta vulgaris PPO2 | |
| SEQ_ID_NO: 8 | cDNA | Beta | cDNA sequence of R126A mutant of Beta | 1575 |
| | | vulgaris | vulgaris PPO2 | |
| SEQ_ID_NO: 9 | protein | Beta | Protein sequence of R126A mutant of Beta | 524 |
| | | vulgaris | vulgaris PPO2 | |
| SEQ_ID_NO: 10 | DNA | Beta | Genomic DNA sequence of R126G mutant of | 37009 |
| | | vulgaris | Beta vulgaris PPO2 | |
| SEQ_ID_NO: 11 | cDNA | Beta | cDNA sequence of R126G mutant of Beta | 1575 |
| | | vulgaris | vulgaris PPO2 | |
| SEQ_ID_NO: 12 | protein | Beta | Protein sequence of R126G mutant of Beta | 524 |
| | | vulgaris | vulgaris PPO2 | |
| SEQ_ID_NO: 13 | DNA | Beta | Genomic DNA sequence of R126L mutant of | 37009 |
| | | vulgaris | Beta vulgaris PPO2 | |
| SEQ_ID_NO: 14 | cDNA | Beta | cDNA sequence of R126L mutant of Beta | 1575 |
| | | vulgaris | vulgaris PPO2 | |
| SEQ_ID_NO: 15 | protein | Beta | Protein sequence of R126L mutant of Beta | 524 |
| | | vulgaris | vulgaris PPO2 | |
| SEQ_ID_NO: 16 | DNA | Beta | Genomic DNA sequence of R126I mutant of Beta | 37009 |
| | | vulgaris | vulgaris PPO2 | |
| SEQ_ID_NO: 17 | cDNA | Beta | cDNA sequence of R126I mutant of Beta | 1575 |
| | | vulgaris | vulgaris PPO2 | |
| SEQ_ID_NO: 18 | protein | Beta | Protein sequence of R126I mutant of Beta | 524 |
| | | vulgaris | vulgaris PPO2 | |
| SEQ_ID_NO: 19 | DNA | Beta | Genomic DNA sequence of R126M mutant of | 37009 |
| | | vulgaris | Beta vulgaris PPO2 | |
| SEQ_ID_NO: 20 | cDNA | Beta | cDNA sequence of R126M mutant of Beta | 1575 |
| | | vulgaris | vulgaris PPO2 | |
| SEQ_ID_NO: 21 | protein | Beta | Protein sequence of R126M mutant of Beta | 524 |
| | | vulgaris | vulgaris PPO2 | |
| SEQ_ID_NO: 22 | DNA | Beta | Genomic DNA sequence of F420V mutant of | 37009 |
| | | vulgaris | Beta vulgaris PPO2 | |
| SEQ_ID_NO: 23 | cDNA | Beta | cDNA sequence of F420V mutant of Beta | 1575 |
| | | vulgaris | vulgaris PPO2 | |
| SEQ_ID_NO: 24 | protein | Beta | Protein sequence of F420V mutant of Beta | 524 |
| | | vulgaris | vulgaris PPO2 | |
| SEQ_ID_NO: 25 | DNA | Beta | Genomic DNA sequence of F420M mutant of | 37009 |
| | | vulgaris | Beta vulgaris PPO2 | |
| SEQ_ID_NO: 26 | cDNA | Beta | cDNA sequence of F420M mutant of Beta | 1575 |
| | | vulgaris | vulgaris PPO2 | |
| SEQ_ID_NO: 27 | protein | Beta | Protein sequence of F420M mutant of Beta | 524 |
| | | vulgaris | vulgaris PPO2 | |
| SEQ_ID_NO: 28 | DNA | Beta | Genomic DNA sequence of F420I mutant of Beta | 37009 |
| | | vulgaris | vulgaris PPO2 | |
| SEQ_ID_NO: 29 | cDNA | Beta | cDNA sequence of F420I mutant of Beta vulgaris | 1575 |
| | | vulgaris | PPO2 | |
| SEQ_ID_NO: 30 | protein | Beta | Protein sequence of F420I mutant of Beta | 524 |
| | | vulgaris | vulgaris PPO2 | |
| SEQ_ID_NO: 31 | DNA | Beta | Genomic DNA sequence of F420L mutant of | 37009 |
| | | vulgaris | Beta vulgaris PPO2 | |
| SEQ_ID_NO: 32 | cDNA | Beta | cDNA sequence of F420L mutant of Beta | 1575 |
| | | vulgaris | vulgaris PPO2 | |
| SEQ_ID_NO: 33 | protein | Beta | Protein sequence of F420L mutant of Beta | 524 |
| | | vulgaris | vulgaris PPO2 | |
| SEQ_ID_NO: 35 | DNA | Beta | Genomic DNA sequence of L397E mutant of | 37009 |
| | | vulgaris | Beta vulgaris PPO2 | |
| SEQ_ID_NO: 36 | cDNA | Beta | cDNA sequence of L397E mutant of Beta | 1575 |
| | | vulgaris | vulgaris PPO2 | |
| SEQ_ID_NO: 37 | protein | Beta | Protein sequence of L397E mutant of Beta | 524 |
| | | vulgaris | vulgaris PPO2 | |
| SEQ_ID_NO: 38 | DNA | Beta | Genomic DNA sequence of G398A mutant of | 37009 |
| | | vulgaris | Beta vulgaris PPO2 | |
| SEQ_ID_NO: 39 | cDNA | Beta | cDNA sequence of G398A mutant of Beta | 1575 |
| | | vulgaris | vulgaris PPO2 | |
| SEQ_ID_NO: 40 | protein | Beta | Protein sequence of G398A mutant of Beta | 524 |
| | | vulgaris | vulgaris PPO2 | |
| SEQ_ID_NO: 41 | DNA | Beta | Genomic DNA sequence of L397E + F420V | 37009 |
| | | vulgaris | double mutant of Beta vulgaris PPO2 | |
| SEQ_ID_NO: 42 | cDNA | Beta | cDNA sequence of L397E + F420V double mutant | 1575 |
| | | vulgaris | of Beta vulgaris PPO2 | |
| SEQ_ID_NO: 43 | protein | Beta | Protein sequence of L397E + F420V double | 524 |
| | | vulgaris | mutant of Beta vulgaris PPO2 | |
| SEQ_ID_NO: 44 | DNA | Beta | Genomic DNA sequence of R126L mutant of | 37009 |
| | | vulgaris | Beta vulgaris PPO2 | |
| SEQ_ID_NO: 45 | cDNA | Beta | cDNA sequence of R126L mutant of Beta | 1575 |
| | | vulgaris | vulgaris PPO2 | |
| SEQ_ID_NO: 46 | DNA | Beta | Genomic DNA sequence of F420L mutant of | 37009 |
| | | vulgaris | Beta vulgaris PPO2 | |
| SEQ_ID_NO: 47 | cDNA | Beta | cDNA sequence of F420L mutant of Beta | 1575 |
| | | vulgaris | vulgaris PPO2 | |
| SEQ_ID_NO: 97 | DNA | Beta | Genomic DNA sequence of G209 mutant of Beta | 37006 |
| | | vulgaris | vulgaris PPO2 with silent mutation | |
| SEQ_ID_NO: 98 | cDNA | Beta | cDNA sequence of G209 mutant of Beta vulgaris | 1572 |
| | | vulgaris | PPO2 | |
| SEQ_ID_NO: 99 | DNA | Beta | Genomic DNA sequence of G398A mutant of | 37009 |
| | | vulgaris | Beta vulgaris PPO2 with silent mutation | |
| SEQ_ID_NO: 100 | DNA | Beta | Genomic DNA (gDNA) sequence of L397E and | 37009 |
| | | vulgaris | F420V mutant of Beta vulgaris PPO2 with silent | |
| | | | mutation | |
| SEQ_ID NO: 101 | cDNA | Beta | cDNA sequence of L397E and F420V mutant of | 1575 |
| | | vulgaris | Beta vulgaris PPO2 | |
| SEQ ID NO: 102 | DNA | Beta | Genomic DNA (gDNA) sequence of R126L | 37009 |
| | | vulgaris | mutant of Beta vulgaris PPO2 with silent | |
| | | | mutation | |
| SEQ_ID_NO: 103 | cDNA | Beta | cDNA sequence of R126L mutant of Beta | 1575 |
| | | vulgaris | vulgaris PPO2 | |
| SEQ_ID_NO: 104 | DNA | Beta | Genomic DNA (gDNA) sequence of G209 | 37006 |
| | | vulgaris | mutant of Beta vulgaris PPO2 with silent | |
| | | | mutation | |
| SEQ ID NO: 105 | cDNA | Beta | cDNA sequence of G209 mutant of Beta vulgaris | 1572 |
| | | vulgaris | PPO2 | |
| SEQ_ID_NO: 106 | DNA | Beta | Genomic DNA (gDNA) sequence of G398A | 37009 |
| | | vulgaris | mutant of Beta vulgaris PPO2 with silent | |
| | | | mutation | |
| SEQ_ID_NO: 107 | DNA | Beta | Genomic DNA (gDNA) sequence of L397E and | 37009 |
| | | vulgaris | F420V mutant of Beta vulgaris PPO2 with silent | |
| | | | mutation | |
| SEQ_ID_NO: 108 | cDNA | Beta | cDNA sequence of L397E and F420V mutant of | 1575 |
| | | vulgaris | Beta vulgaris PPO2 | |

### Example 10: Combining Different Mutations in Hybrids

[0171] To evaluate the resistance in lines carrying more than one PPO edit, plants produced by the methods above may be crossed to produce various cis (same allele) and trans (homologous allele) heterozygotes and homozygotes. As an example, flowering individuals of the male-fertile/female-fertile version of a line carrying the G209 edit may be placed in an isolation chamber together with flowering individuals of the male-sterile/female-fertile version of a carrying the R126 edit. This is repeated using all genotypes and combination of edits. The seeds from the male-sterile/female-fertile plants were harvested as single hybrid seeds, and genetic edits can be confirmed using sequencing or marker analysis.

[0172] Additionally, as some edits may be produced on the same (cis) allele, a number of combinations are envisioned, including for example, wherein one edit may be in a homozygous state, and a second may be in a heterozygous state (i.e., a plant comprising a 397/420 double edit allele is crossed with a plant comprising a 420 edited allele to produce a plant homozygous for a substitution at 420 and heterozygous for a substitution at 397).

### INCORPORATION BY REFERENCE

[0173] All references, articles, publications, patents, patent publications, and patent applications cited herein are incorporated by reference in their entireties for all purposes. However, mention of any reference, article, publication, patent, patent publication, and patent application cited herein is not, and should not, be taken as an acknowledgment or any form of suggestion that they constitute valid prior art or form part of the common general knowledge in any country in the world.

### NUMBERED EMBODIMENTS

1. A method of producing a Beta vulgaris plant with increased tolerance to an herbicide that inhibits protoporphyrinogen oxidase comprising the steps of:
[0174] a) transfecting a protoplast obtained from Beta vulgaris cells with a genome editing system to generate a transfected protoplast, wherein the genome editing system comprises:
   [0175] i) a Cas enzyme;
   [0176] ii) at least one guide RNA (gRNA), wherein the at least one gRNA targets a genomic region corresponding to between position 3653 and 3698 of SEQ ID NO: 1; and
   [0177] iii) at least one single-stranded donor DNA repair template designed to introduce a substitution of arginine at a position corresponding to 126 of SEQ ID NO: 3;
[0178] b) exposing the transfected protoplast to a selective pressure of at least one herbicide that inhibits protoporphyrinogen oxidase;
[0179] c) selecting a protoplast comprising a substitution of arginine at a position corresponding to 126 of SEQ ID NO: 3; and
[0180] d) regenerating a plant from said selected protoplast to produce a Beta vulgaris plant with increased tolerance to an herbicide that inhibits protoporphyrinogen oxidase.
   2. The method of embodiment 1, wherein said method is plasmid-free.
   3. The method of embodiment 1 or 2, wherein the at least one gRNA targets a genomic region corresponding to between position 3679 and 3698 of SEQ ID NO: 1.
   4. The method of any one of embodiments 1-3, wherein the protoplast is obtained from stomatal guard cells.
   5. The method of any one of embodiments 1-4, wherein the transfecting is polyethylene glycol mediated transfection.
   6. The method of any one of embodiments 1-5, wherein the selective pressure is media comprising 2.5 μM Saflufenacil.
   7. The method of any one of embodiments 1-6, wherein the Cas enzyme is selected from Cas9 and Cpf1.
   8. The method of any one of embodiments 1-7, wherein the gRNA is selected from SEQ ID Nos: 69-71, and 74.
   9. The method of any one of embodiments 1-8, wherein the donor DNA repair template is selected from SEQ ID NOs: 52-56, 58-59, 66, and 93.
   10. The method of any one of embodiments 1-9, wherein the genome editing system comprises:
[0181] i) Cas9;
[0182] ii) a gRNA comprising SEQ ID NO: 71; and
[0183] iii) a donor DNA repair template comprising SEQ ID NO: 58 or 59
   11. The method of any one of embodiments 1-9, wherein the genome editing system comprises:
[0184] i) Cpf1;
[0185] ii) a gRNA selected from SEQ ID NOs: 69-70, and 74; and
[0186] iii) a donor DNA repair template selected from SEQ ID Nos. 52-56, 58-59, 66, and 93.
   12. The method of any one of embodiments 1-11, wherein the substitution replaces arginine with alanine.
   13. The method of any one of embodiments 1-11, wherein the substitution replaces arginine with glycine.
   14. The method of any one of embodiments 1-11, wherein the substitution replaces arginine with leucine.
   15. The method of any one of embodiments 1-11, wherein the substitution replaces arginine with isoleucine.
   16. The method of any one of embodiments 1-11, wherein the substitution replaces arginine with methionine.
   17. The method of any one of embodiments 1-11, wherein the selected protoplast comprises an engineered PPO2 protein comprising a substitution of arginine at a position corresponding to 126 of SEQ ID NO: 3 and wherein the PPO2 protein is at least 99% identical to SEQ ID NO: 3.
   18. The method of any one of embodiments 1-11, wherein the selected protoplast comprises an engineered PPO2 protein comprising a substitution of arginine at a position corresponding to 126 of SEQ ID NO: 3 and wherein the PPO2 protein is at least 99% identical to SEQ ID NO: 9.
   19. The method of any one of embodiments 1-11, wherein the selected protoplast comprises an engineered PPO2 protein comprising a substitution of arginine at a position corresponding to 126 of SEQ ID NO: 3 and wherein the PPO2 protein is at least 99% identical to SEQ ID NO: 12.
   20 The method of any one of embodiments 1-11, wherein the selected protoplast comprises an engineered PPO2 protein comprising a substitution of arginine at a position corresponding to 126 of SEQ ID NO: 3 and wherein the PPO2 protein is at least 99% identical to SEQ ID NO: 15.
   21. The method of any one of embodiments 1-11, wherein the selected protoplast comprises an engineered PPO2 protein comprising a substitution of arginine at a position corresponding to 126 of SEQ ID NO: 3 and wherein the PPO2 protein is at least 99% identical to SEQ ID NO: 18.
   22 The method of any one of embodiments 1-11, wherein the selected protoplast comprises an engineered PPO2 protein comprising a substitution of arginine at a position corresponding to 126 of SEQ ID NO: 3 and wherein the PPO2 protein is at least 99% identical to SEQ ID NO: 21.
   23. The method of any one of embodiments 1-11, wherein the selected protoplast comprises an engineered PPO2 protein comprising a substitution of arginine at a position corresponding to 126 of SEQ ID NO: 3 and wherein the PPO2 protein is encoded by a nucleic acid having at least 90% identity to SEQ ID NO: 1.
   24. A Beta vulgaris plant produced by the method of any one of embodiments 1-11, wherein the plant comprises a substitution of arginine with leucine at a position corresponding to 126 of SEQ ID NO: 3.
   25. The Beta vulgaris plant, or part thereof, of embodiment 24, wherein the plant, or part thereof further comprises a nucleic acid encoding a protoporphyrinogen oxidase 2 (PPO2) amino acid sequence having at least one mutation selected from:
[0187] a) an in-frame deletion of glycine at a position corresponding to 208 and/or 209 of SEQ ID NO: 3;
[0188] b) a substitution of leucine at a position corresponding to 397 of SEQ ID NO: 3;
[0189] c) a substitution of glycine at a position corresponding to 398 of SEQ ID NO: 3; and
[0190] d) a substitution of phenylalanine at a position corresponding to 420 of SEQ ID NO: 3.
   26. The Beta vulgaris plant, or part thereof, of embodiment 25, wherein leucine at position 397 is replaced with glutamic acid.
   27 The Beta vulgaris plant, or part thereof, of embodiment 25, wherein glycine at position 398 is replaced with alanine.
   28. The Beta vulgaris plant, or part thereof, of embodiment 25, wherein phenylalanine at position 420 is replaced with valine, methionine, isoleucine, or leucine.
   29. The Beta vulgaris plant, or part thereof, of embodiment 25, wherein leucine at position 397 is replaced with glutamic acid and the phenylalanine at position 420 is replaced with valine.
   30. The Beta vulgaris plant, or part thereof, of any one of embodiments 25-29, wherein the nucleic acid encoding a protoporphyrinogen oxidase 2 (PPO2) amino acid sequence having at least one of a), b), c), and d) is on the same allele as the substitution of arginine at a position corresponding to 126 of SEQ ID NO: 3.
   31. The Beta vulgaris plant, or part thereof, of any one of embodiments 25-29, wherein the nucleic acid encoding a protoporphyrinogen oxidase 2 (PPO2) amino acid sequence having at least one of a), b), c), and d) is on a different allele as the substitution of arginine at a position corresponding to 126 of SEQ ID NO: 3.
   32. The Beta vulgaris plant, or part thereof, of any one of embodiments 25-29, wherein the plant or plant part is homozygous for at least one of:
[0191] a) a substitution of arginine at a position corresponding to 126 of SEQ ID NO: 3;
[0192] b) an in-frame deletion of glycine at a position corresponding to 208 and/or 209 of SEQ ID NO: 3;
[0193] c) a substitution of leucine at a position corresponding to 397 of SEQ ID NO: 3;
[0194] d) a substitution of glycine at a position corresponding to 398 of SEQ ID NO: 3; and
[0195] e) a substitution of phenylalanine at a position corresponding to 420 of SEQ ID NO: 3.
   33. The Beta vulgaris plant, or part thereof, of any one of embodiments 25-29, wherein the plant, or part thereof, is produced by crossing a first Beta vulgaris plant which is homozygous for a substitution of arginine with leucine at a position corresponding to 126 of SEQ ID NO: 3 with a second Beta vulgaris plant which is homozygous for at least one of the following mutations:
[0196] a) an in-frame deletion of glycine at a position corresponding to 208 and/or 209 of SEQ ID NO: 3;
[0197] b) a substitution of leucine at a position corresponding to 397 of SEQ ID NO: 3;
[0198] c) a substitution of glycine at a position corresponding to 398 of SEQ ID NO: 3; and
[0199] d) a substitution of phenylalanine at a position corresponding to 420 of SEQ ID NO: 3.
   34. The Beta vulgaris plant, or part thereof, of any one of embodiments 25-33, wherein the plant, or part thereof, is resistant to an herbicide.
   35. The Beta vulgaris plant, or part thereof, of embodiment 34, wherein the plant, or part thereof, has increased tolerance to an herbicide that inhibits protoporphyrinogen oxidase when compared to a plant not having the amino acid substitution at a position corresponding to 126 of SEQ ID NO: 3.
   36. The Beta vulgaris plant, or part thereof, of embodiment 35, wherein the herbicide is selected from the group consisting of: acifluorfen, fomesafen, lactofen, fluoroglycofen-ethyl, oxyfluorfen, flumioxazin, azafenidin, carfentrazone-ethyl, sulfentrazone, fluthiacet-methyl, oxadiargyl, oxadiazon, pyraflufen-ethyl, saflufenacil, trifludimoxazin, and S-3100.
   37. The Beta vulgaris plant, or part thereof, of any one of embodiments 24-36, wherein the plant is a sugar beet or a fodder beet.
   38. The Beta vulgaris plant, or part thereof, of any one of embodiments 24-37, further comprising an additional desired trait.
   39. The Beta vulgaris plant, or part thereof, of embodiment 38, wherein the desired trait confers resistance to a non-PPO herbicide.
   40. The Beta vulgaris plant, or part thereof, of embodiment 39, wherein the non-PPO herbicide is a glyphosate.
   41. The Beta vulgaris plant, or part thereof, of embodiment 40, wherein the glyphosate resistance is conferred by the H7-1 event.
   42. An isolated polynucleotide comprising an engineered nucleic acid sequence encoding a protein comprising an amino acid substitution at a position corresponding to 126 of SEQ ID NO: 3, wherein the substitution is selected from the group consisting of: R126A, R126G, R126L, R126I, and R126M.
   43. The polynucleotide of embodiment 42, wherein the engineered nucleic acid sequence is at least 90% identical to SEQ ID NO: 1.
   44. The polynucleotide of embodiment 42 or 43, wherein the engineered nucleic acid sequence further comprises one or more additional mutations encoding amino acid substitutions at positions corresponding to 397, 398, and 420 of SEQ ID NO: 3.
   45. The polynucleotide of any one of embodiments 42-44, wherein the engineered nucleic acid sequence further comprises an in-frame deletion corresponding to amino acids at positions 208 and/or 209 of SEQ ID NO: 3.
   46. A DNA construct comprising the polynucleotide of any one of embodiments 42-45.
   47. A method for producing a Beta vulgaris plant or plant cell having an engineered PPO2 protein comprising: introducing a nucleic acid mutation by targeted genome editing that results in an amino acid substitution corresponding to position 126 of SEQ ID NO: 3.
   48. The method of embodiment 47, wherein the Beta vulgaris plant or plant cell further comprises a nucleic acid encoding a protoporphyrinogen oxidase 2 (PPO2) amino acid sequence having at least one of:
[0200] a) an in-frame deletion of glycine at a position corresponding to 208 and/or 209 of SEQ ID NO: 3;
[0201] b) a substitution of leucine at a position corresponding to 397 of SEQ ID NO: 3;
[0202] c) a substitution of glycine at a position corresponding to 398 of SEQ ID NO: 3; and
[0203] d) a substitution of phenylalanine at a position corresponding to 420 of SEQ ID NO: 3.
   49. The method of embodiment 48, wherein the nucleic acid encoding a protoporphyrinogen oxidase 2 (PPO2) amino acid sequence having at least one of a), b), c), and d) is on the same allele as the substitution corresponding to position number 126 of SEQ ID NO: 3.
   50. The method of embodiment 48, wherein the nucleic acid encoding a protoporphyrinogen oxidase 2 (PPO2) amino acid sequence having at least one of a), b), c), and d) is on a different allele as the substitution corresponding to position number 126 of SEQ ID NO: 3.
   51. The method of embodiment 50, wherein the nucleic acid encoding a protoporphyrinogen oxidase 2 (PPO2) amino acid sequence having at least one of a), b), c), and d) on a different allele is introduced by a breeding technique.
   52. A Beta vulgaris plant produced by the method of any one of embodiments 47-51, wherein said plant is resistant or tolerant to one or more herbicides.
   53. The Beta vulgaris plant of embodiment 52, wherein the plant is resistant to a PPO herbicide selected from the group consisting of: acifluorfen, fomesafen, lactofen, fluoroglycofen-ethyl, oxyfluorfen, flumioxazin, azafenidin, carfentrazone-ethyl, sulfentrazone, fluthiacet-methyl, oxadiargyl, oxadiazon, pyraflufen-ethyl, saflufenacil, trifludimoxazin, and S-3100.
   54. A method for controlling undesired vegetation at a Beta vulgaris cultivation site, the method comprising:
[0204] a) growing the Beta vulgaris plant of embodiment 24, 25, or 52, at a cultivation site; and
[0205] b) applying to the cultivation site an effective amount of a PPO herbicide.
   55. The method of embodiment 54, wherein the PPO herbicide selected from the group consisting of: acifluorfen, fomesafen, lactofen, fluoroglycofen-ethyl, oxyfluorfen, flumioxazin, azafenidin, carfentrazone-ethyl, sulfentrazone, fluthiacet-methyl, oxadiargyl, oxadiazon, pyraflufen-ethyl, saflufenacil, trifludimoxazin, and S-3100.
   56. A guide RNA suitable for use in a CRISPR based genome editing system, wherein said guide RNA is selected from SEQ ID NOs: 67-80.
   57. A donor template sequence suitable for use in a CRISPR based genome editing system, wherein said donor template sequence is selected from SEQ ID NOs: 48-66, and 90-96.
   58. A DNA construct comprising the guide RNA of embodiment 56 and the donor template sequence of embodiment 57.
   59. An engineered PPO2 protein comprising an amino acid substitution corresponding to position number 126 in SEQ ID NO: 3.
   60. The engineered protein of embodiment 59, wherein said protein is at least 99% identical to SEQ ID NO: 3.
   61. The engineered protein of embodiment 59, wherein said protein is at least 99% identical to SEQ ID NO: 9.
   62. The engineered protein of embodiment 59, wherein said protein is at least 99% identical to SEQ ID NO: 12.
   63. The engineered protein of embodiment 59, wherein said protein is at least 99% identical to SEQ ID NO: 15.
   64. The engineered protein of embodiment 59, wherein said protein is at least 99% identical to SEQ ID NO: 18.
   65. The engineered protein of embodiment 59, wherein said protein is at least 99% identical to SEQ ID NO: 21.
   66. The engineered protein of any one of embodiments 59-65, wherein said protein further comprises at least one of:
[0206] a) an in-frame deletion of glycine at a position corresponding to 208 and/or 209 of SEQ ID NO: 3;
[0207] b) a substitution of leucine at a position corresponding to 397 of SEQ ID NO: 3;
[0208] c) a substitution of glycine at a position corresponding to 398 of SEQ ID NO: 3; and
[0209] d) a substitution of phenylalanine at a position corresponding to 420 of SEQ ID NO: 3.
   67. A non-transgenic, genetically engineered Beta vulgaris plant, or part thereof, comprising a nucleic acid encoding a protoporphyrinogen oxidase 2 (PPO2) amino acid sequence, wherein said PPO2 amino acid sequence has been engineered to comprise a substitution of arginine at a position corresponding to 126 of SEQ ID NO: 3.
   68. The Beta vulgaris plant, or part thereof, of embodiment 67, wherein the engineered nucleic acid encoding a protoporphyrinogen oxidase 2 (PPO2) amino acid sequence is obtained by targeted mutagenesis of the endogenous PPO2 gene.

What is claimed is:

1. A method of producing a Beta vulgaris plant with increased tolerance to an herbicide that inhibits protoporphyrinogen oxidase comprising the steps of:
a) transfecting a protoplast obtained from Beta vulgaris cells with a genome editing system to generate a transfected protoplast, wherein the genome editing system comprises:
i) a Cas enzyme;
ii) at least one guide RNA (gRNA), wherein the at least one gRNA targets a genomic region corresponding to between position 3653 and 3698 of SEQ ID NO: 1; and
iii) at least one single-stranded donor DNA repair template designed to introduce a substitution of arginine at a position corresponding to 126 of SEQ ID NO: 3;
b) exposing the transfected protoplast to a selective pressure of at least one herbicide that inhibits protoporphyrinogen oxidase;
c) selecting a protoplast comprising a substitution of arginine at a position corresponding to 126 of SEQ ID NO: 3; and
d) regenerating a plant from said selected protoplast to produce a Beta vulgaris plant with increased tolerance to an herbicide that inhibits protoporphyrinogen oxidase.

2. The method of claim 1, wherein said method is plasmid-free.

3. The method of claim 1, wherein the at least one gRNA targets a genomic region corresponding to between position 3679 and 3698 of SEQ ID NO: 1.

4. The method of claim 1, wherein the protoplast is obtained from stomatal guard cells.

5. The method of claim 1, wherein the transfecting is polyethylene glycol mediated transfection.

6. The method of claim 1, wherein the selective pressure is media comprising 2.5 μM Saflufenacil.

7. The method of claim 1, wherein the Cas enzyme is selected from Cas9 and Cpf1.

8. The method of claim 1, wherein the gRNA is selected from SEQ ID Nos: 69-71, and 74.

9. The method of claim 1, wherein the donor DNA repair template is selected from SEQ ID NOs: 52-56, 58-59, 66, and 93.

10. The method of claim 1, wherein the genome editing system comprises:
i) Cas9;
ii) a gRNA comprising SEQ ID NO: 71; and
iii) a donor DNA repair template comprising SEQ ID NO: 58 or 59

11. The method of claim 1, wherein the genome editing system comprises:
i) Cpf1;
ii) a gRNA selected from SEQ ID NOs: 69-70, and 74; and
iii) a donor DNA repair template selected from SEQ ID Nos. 52-56, 58-59, 66, and 93.

12. The method of claim 1, wherein the substitution replaces arginine with alanine.

13. The method of claim 1, wherein the substitution replaces arginine with glycine.

14. The method of claim 1, wherein the substitution replaces arginine with leucine.

15. The method of claim 1, wherein the substitution replaces arginine with isoleucine.

16. The method of claim 1, wherein the substitution replaces arginine with methionine.

17. The method of claim 1, wherein the selected protoplast comprises an engineered PPO2 protein comprising a substitution of arginine at a position corresponding to 126 of SEQ ID NO: 3 and wherein the PPO2 protein is at least 99% identical to SEQ ID NO: 3.

18. The method of claim 1, wherein the selected protoplast comprises an engineered PPO2 protein comprising a substitution of arginine at a position corresponding to 126 of SEQ ID NO: 3 and wherein the PPO2 protein is at least 99% identical to SEQ ID NO: 9.

19. The method of claim 1, wherein the selected protoplast comprises an engineered PPO2 protein comprising a substitution of arginine at a position corresponding to 126 of SEQ ID NO: 3 and wherein the PPO2 protein is at least 99% identical to SEQ ID NO: 12.

20. The method of claim 1, wherein the selected protoplast comprises an engineered PPO2 protein comprising a substitution of arginine at a position corresponding to 126 of SEQ ID NO: 3 and wherein the PPO2 protein is at least 99% identical to SEQ ID NO: 15.

21. The method of claim 1, wherein the selected protoplast comprises an engineered PPO2 protein comprising a substitution of arginine at a position corresponding to 126 of SEQ ID NO: 3 and wherein the PPO2 protein is at least 99% identical to SEQ ID NO: 18.

22. The method of claim 1, wherein the selected protoplast comprises an engineered PPO2 protein comprising a substitution of arginine at a position corresponding to 126 of SEQ ID NO: 3 and wherein the PPO2 protein is at least 99% identical to SEQ ID NO: 21.

23. The method of claim 1, wherein the selected protoplast comprises an engineered PPO2 protein comprising a substitution of arginine at a position corresponding to 126 of SEQ ID NO: 3 and wherein the PPO2 protein is encoded by a nucleic acid having at least 90% identity to SEQ ID NO: 1.

24. A Beta vulgaris plant produced by the method of claim 1, wherein the plant comprises a substitution of arginine with leucine at a position corresponding to 126 of SEQ ID NO: 3.

25. The Beta vulgaris plant, or part thereof, of claim 24, wherein the plant, or part thereof further comprises a nucleic acid encoding a protoporphyrinogen oxidase 2 (PPO2) amino acid sequence having at least one mutation selected from:
a) an in-frame deletion of glycine at a position corresponding to 208 and/or 209 of SEQ ID NO: 3;
b) a substitution of leucine at a position corresponding to 397 of SEQ ID NO: 3;
c) a substitution of glycine at a position corresponding to 398 of SEQ ID NO: 3; and
d) a substitution of phenylalanine at a position corresponding to 420 of SEQ ID NO: 3.

26. The Beta vulgaris plant, or part thereof, of claim 25, wherein leucine at position 397 is replaced with glutamic acid.

27. The Beta vulgaris plant, or part thereof, of claim 25, wherein glycine at position 398 is replaced with alanine.

28. The Beta vulgaris plant, or part thereof, of claim 25, wherein phenylalanine at position 420 is replaced with valine, methionine, isoleucine, or leucine.

29. The Beta vulgaris plant, or part thereof, of claim 25, wherein leucine at position 397 is replaced with glutamic acid and the phenylalanine at position 420 is replaced with valine.

30. The Beta vulgaris plant, or part thereof, of claim 25, wherein the nucleic acid encoding a protoporphyrinogen oxidase 2 (PPO2) amino acid sequence having at least one of a), b), c), and d) is on the same allele as the substitution of arginine at a position corresponding to 126 of SEQ ID NO: 3.

31. The Beta vulgaris plant, or part thereof, of claim 25, wherein the nucleic acid encoding a protoporphyrinogen oxidase 2 (PPO2) amino acid sequence having at least one of a), b), c), and d) is on a different allele as the substitution of arginine at a position corresponding to 126 of SEQ ID NO: 3.

32. The Beta vulgaris plant, or part thereof, of claim 25, wherein the plant or plant part is homozygous for at least one of:
a) a substitution of arginine at a position corresponding to 126 of SEQ ID NO: 3; an in-frame deletion of glycine at a position corresponding to 208 and/or 209 of SEQ ID NO: 3;
b) a substitution of leucine at a position corresponding to 397 of SEQ ID NO: 3;
c) a substitution of glycine at a position corresponding to 398 of SEQ ID NO: 3; and
d) a substitution of phenylalanine at a position corresponding to 420 of SEQ ID NO: 3.

33. The Beta vulgaris plant, or part thereof, of claim 25, wherein the plant, or part thereof, is produced by crossing a first Beta vulgaris plant which is homozygous for a substitution of arginine with leucine at a position corresponding to 126 of SEQ ID NO: 3 with a second Beta vulgaris plant which is homozygous for at least one of the following mutations:
a) an in-frame deletion of glycine at a position corresponding to 208 and/or 209 of SEQ ID NO: 3;
b) a substitution of leucine at a position corresponding to 397 of SEQ ID NO: 3;
c) a substitution of glycine at a position corresponding to 398 of SEQ ID NO: 3; and
d) a substitution of phenylalanine at a position corresponding to 420 of SEQ ID NO: 3.

34. The Beta vulgaris plant, or part thereof of claim 25, wherein the plant, or part thereof, is resistant to an herbicide.

35. The Beta vulgaris plant, or part thereof of claim 34, wherein the plant, or part thereof, has increased tolerance to an herbicide that inhibits protoporphyrinogen oxidase when compared to a plant not having the amino acid substitution at a position corresponding to 126 of SEQ ID NO: 3.

36. The Beta vulgaris plant, or part thereof of claim 35, wherein the herbicide is selected from the group consisting of: acifluorfen, fomesafen, lactofen, fluoroglycofen-ethyl, oxyfluorfen, flumioxazin, azafenidin, carfentrazone-ethyl, sulfentrazone, fluthiacet-methyl, oxadiargyl, oxadiazon, pyraflufen-ethyl, saflufenacil, trifludimoxazin, and S-3100.

37. The Beta vulgaris plant, or part thereof of claim 24, wherein the plant is a sugar beet or a fodder beet.

38. The Beta vulgaris plant, or part thereof of claim 24, further comprising an additional desired trait.

39. The Beta vulgaris plant, or part thereof of claim 38, wherein the desired trait confers resistance to a non-PPO herbicide.

40. The Beta vulgaris plant, or part thereof of claim 39, wherein the non-PPO herbicide is a glyphosate.

41. The Beta vulgaris plant, or part thereof, of claim 40, wherein the glyphosate resistance is conferred by the H7-1 event.

42. An isolated polynucleotide comprising an engineered nucleic acid sequence encoding a protein comprising an amino acid substitution at a position corresponding to 126 of SEQ ID NO: 3, wherein the substitution is selected from the group consisting of: R126A, R126G, R126L, R126I, and R126M.

43. The polynucleotide of claim 42, wherein the engineered nucleic acid sequence is at least 90% identical to SEQ ID NO: 1.

44. The polynucleotide of claim 42, wherein the engineered nucleic acid sequence further comprises one or more additional mutations encoding amino acid substitutions at positions corresponding to 397, 398, and 420 of SEQ ID NO: 3.

45. The polynucleotide of claim 42, wherein the engineered nucleic acid sequence further comprises an in-frame deletion corresponding to amino acids at positions 208 and/or 209 of SEQ ID NO: 3.

46. A DNA construct comprising the polynucleotide of any one of claims 42-45.

47. A method for producing a Beta vulgaris plant or plant cell having an engineered PPO2 protein comprising: introducing a nucleic acid mutation by targeted genome editing that results in an amino acid substitution corresponding to position 126 of SEQ ID NO: 3.

48. The method of claim 47, wherein the Beta vulgaris plant or plant cell further comprises a nucleic acid encoding a protoporphyrinogen oxidase 2 (PPO2) amino acid sequence having at least one of:
a) an in-frame deletion of glycine at a position corresponding to 208 and/or 209 of SEQ ID NO: 3;
b) a substitution of leucine at a position corresponding to 397 of SEQ ID NO: 3;
c) a substitution of glycine at a position corresponding to 398 of SEQ ID NO: 3; and
d) a substitution of phenylalanine at a position corresponding to 420 of SEQ ID NO: 3.

49. The method of claim 48, wherein the nucleic acid encoding a protoporphyrinogen oxidase 2 (PPO2) amino acid sequence having at least one of a), b), c), and d) is on the same allele as the substitution corresponding to position number 126 of SEQ ID NO: 3.

50. The method of claim 48, wherein the nucleic acid encoding a protoporphyrinogen oxidase 2 (PPO2) amino acid sequence having at least one of a), b), c), and d) is on a different allele as the substitution corresponding to position number 126 of SEQ ID NO: 3.

51. The method of claim 50, wherein the nucleic acid encoding a protoporphyrinogen oxidase 2 (PPO2) amino acid sequence having at least one of a), b), c), and d) on a different allele is introduced by a breeding technique.

52. A Beta vulgaris plant produced by the method of claim 47, wherein said plant is resistant or tolerant to one or more herbicides.

53. The Beta vulgaris plant of claim 52, wherein the plant is resistant to a PPO herbicide selected from the group consisting of: acifluorfen, fomesafen, lactofen, fluoroglycofen-ethyl, oxyfluorfen, flumioxazin, azafenidin, carfentrazone-ethyl, sulfentrazone, fluthiacet-methyl, oxadiargyl, oxadiazon, pyraflufen-ethyl, saflufenacil, trifludimoxazin, and S-3100.

54. A method for controlling undesired vegetation at a Beta vulgaris cultivation site, the method comprising:
a) growing the Beta vulgaris plant of claim 24, 25, or 52, at a cultivation site; and
b) applying to the cultivation site an effective amount of a PPO herbicide.

55. The method of claim 54, wherein the PPO herbicide selected from the group consisting of: acifluorfen, fomesafen, lactofen, fluoroglycofen-ethyl, oxyfluorfen, flumioxazin, azafenidin, carfentrazone-ethyl, sulfentrazone, fluthiacet-methyl, oxadiargyl, oxadiazon, pyraflufen-ethyl, saflufenacil, trifludimoxazin, and S-3100.

56. A guide RNA suitable for use in a CRISPR based genome editing system, wherein said guide RNA is selected from SEQ ID NOs: 67-80.

57. A donor template sequence suitable for use in a CRISPR based genome editing system, wherein said donor template sequence is selected from SEQ ID NOs: 48-66, and 90-96.

58. A DNA construct comprising the guide RNA of claim 56 and the donor template sequence of claim 57.

59. An engineered PPO2 protein comprising an amino acid substitution corresponding to position number 126 in SEQ ID NO: 3.

60. The engineered protein of claim 59, wherein said protein is at least 99% identical to SEQ ID NO: 3.

61. The engineered protein of claim 59, wherein said protein is at least 99% identical to SEQ ID NO: 9.

62. The engineered protein of claim 59, wherein said protein is at least 99% identical to SEQ ID NO: 12.

63. The engineered protein of claim 59, wherein said protein is at least 99% identical to SEQ ID NO: 15.

64. The engineered protein of claim 59, wherein said protein is at least 99% identical to SEQ ID NO: 18.

65. The engineered protein of claim 59, wherein said protein is at least 99% identical to SEQ ID NO: 21.

66. The engineered protein of claim 59, wherein said protein further comprises at least one of:
a) an in-frame deletion of glycine at a position corresponding to 208 and/or 209 of SEQ ID NO: 3;
b) a substitution of leucine at a position corresponding to 397 of SEQ ID NO: 3;
c) a substitution of glycine at a position corresponding to 398 of SEQ ID NO: 3; and
d) a substitution of phenylalanine at a position corresponding to 420 of SEQ ID NO: 3.

67. A non-transgenic, genetically engineered Beta vulgaris plant, or part thereof, comprising a nucleic acid encoding a protoporphyrinogen oxidase 2 (PPO2) amino acid sequence, wherein said PPO2 amino acid sequence has been engineered to comprise a substitution of arginine at a position corresponding to 126 of SEQ ID NO: 3.

68. The Beta vulgaris plant, or part thereof, of claim 67, wherein the engineered nucleic acid encoding a protoporphyrinogen oxidase 2 (PPO2) amino acid sequence is obtained by targeted mutagenesis of the endogenous PPO2 gene.

The application's sequence listing, which the Patent Office published only in electronic form, follows.

SEQUENCE LISTING (111 sequences)

SEQ ID NO: 1 - DNA, 37009 bp, Beta vulgaris
  source 1..37009: mol_type = other DNA
tattccatcgaatgtagcaaattgactgtccgttgcaatttcggagtttccactcgtcgcatggtaaatggtaatgctatacgattctcacctctcaggagtctcaactcatcttcaactatcgcaggcatttcccaggaagaacccattaatggccaaagtgtctgagccgggtaaacccagtaagtcaaacattcgaatcacaactcaagcaaatttgtcttgtttgcgttatattttgctcatttcagccttttttgtttttccgacctttgcatactgaatattgtgtgtgtgtgtgtgtggggtttcagcttctgctaaaaggattgctgttgttggtgctggtgttaggtaaattttcgtctcttgcagagtttttgagtcatttgggaattctatgtgaaacttgtaactcccttcagtccaacgaacgcagtacaattttctatcaaatcatggtcctaatttccaattttccatatatattgttggaattatattgggattgtctatcactattaatagtattaggatcaattgtagagaagcacagaaatttttgggatcgaaagaatatctggattgccacattaacagcagatataattcttccaattggtttttggttcttcctaccttgacttgtctggtcaaacattataaactttaacctttaatatccattaaagtaaactataggatttttttgtctaaaacatgcttatataacatgaaatttgtgagaaaccaccttatatatatttttttgcgaaaacaaaccttaaacaaaattattatcgtgagaacaaaccttatgccaatttcgatcattgacccaaggttttggcattgaccgtgtcatgaattttgttgggtttaaaaagtcatgtgtcttgcatacgaaatggtaaatgcgggaaccttgggtcaatgtttggaatccgcataaggtttgttctcccaaaaaatgtttttgttcaaggtttgtttttgcaaaaaaacttatataaggtgctttctcagaaatttcatgttttataaagtagtatttgacaaaaaaccctaaaatatattatagaattattattgactaaattgtgtaaaaatgtactcttctaaaagtacattatagtattttagtggaacatttgcgagaaactactttataaatacgatttttgcgagaaatttcctaataaaaaaatgtgaagtgcaaaactatcttattgataattttctactccctcaaatccaaaatactatgaagtctttcctttctggtttgtcccagattagtttgtacgcttccatctttggtatgatcccacttttattatacttattagttttacgtgagttccttactctatctcttttaacaaaaatactcaactatctctatccaataaaaagttccttactagtcctatcacatctgctttttaataaaataacgtttgataaccacacaacttatatccttaaaatacacgttcaaccaagtgttgagattaatttggacggagggaataaatattttttgaggcatattggtagcagtattcggattccgataggttgactatgtttccaatgttgaccaacacttgccttgcatgtaattctaactttgctcttttttattcttcatttccctcgtattccatatacaatgtttagagacccattccttcctcttctcttctttcccttccttactatgctttgccataatcttcctcaaatgagtgcaaattaatttgtcgttgatgtaggccaactgattgtagcacatcttcatagttcatacctcaacacactcgtaattatattataccctacatgttaaatggctcatgaagctttattttatatcatacttcctccgtttcacaataagtgtaacacttttcttatttggaataatcacaataagtgaaaccaagctccaaatggtaagaaaagttcactcttattacaaatataccaccaaaaagtaagaggggatcacaacttcaatacttcttcactctactttattgtggtcccaactttctctctctaaattccttggtaactccccactttctctatgtttcacttatggtgaaatggaggaagtattttgtagtggtatttagctactaggccttggatgatatacaatcatacaatgtatttatattcacgataatttgctgcccaccttgattaccatgatttccaccaattttatcaatttcagtacttcaccaccccgaatttatattttttatttccaaccttggtatctccatttgtctgagtgcccgatccatttgtatcgcctccagaattgaagaagcttcctgcagctagacaattaggaaggttaaaaaagtttggagatggtggaggatagccataataatcattgttgggaggtggaacttggaaggttattgtagggttgaagtccttgatgaagaagaattgagttcaaatgagaggaaaaaggagcagggaagagggacaataagaaaaaaaagggtaaactaaaatcacgtgtaaggcatgtgcagatcaacatcagaaagcatagtcaacctactggtattagggcactgatacctttttgggtcaaaatttttttacaaggtatttcatgaggtagttttgtccatttttttttttacaaggtatcgtctcattttttttttatcatttagtttctcgcaataagtgtatttcatgaggtagttttttccaaaatttcctcatttattataaaatacctcatcttttccataaataatgcaatgtctagacttttacgctgtttacacatgctcctttgaccatctattgacacacaaggaaaaatagagtagagtcatgcaggatcttgttagatttttctcgatatatactttcaaaagatcaatttttttataattttttttttgaggggattttttttttataattatgtacttatcaaaggtcaaagttgtgcaccgggaagcataaaactctatgtgttgcaatttacatggaaggggaggagtataataagagaaaattatggtaaaaggttcattcctggagatcatgagaaaggaagtagaaagaacaaaaaagaacaatgggagtgcttttcaatgtttgttgtacgtagcatttattcatttgctataatgttttgtgacattgtagtggacttgctgccgcatataagctaaagtcccatggcttgagtgtgacattgtttgaagctgatactagagctggaggaaaactcaaaactgttgcaaaggatggtttgatttgggatgagggggcaaatactatggtaatgtttttgattattgcaggtcttgcactttagcgcacaattaatttctggatttttttttgtactgtggtggttatggtcatcaacatgtctcacccactgtgcttgcagatagagagtgaagcggaggtcacgagtttactcgatgatcttgggcttcgtgagaagcagcagtttgtaagtctttcattatctgaatggcacatactttatttcgaaagattgtaattgccttttctttctagatggcttcatcttcatgttgctttctgattcagtttcgtggctaactttccaagtttgtctgattgctaactctgtcatagccaattgcacaaaacaaaagatacattgcgagagacggtcgtcctgtgctggtaagtttgcttgttttacttttgacctcttttaagatctttcaactctggagcctggaaacatggtgatgcaggaggcaagttctctctattttacatcctttcttctctgtatcttatgacatttgcctcttattctgtgcagataccttcgagtcccattgcacttctcaagagcaatatcctttcagcgcaatctaaggtcgttttatgttaagacatacttgatgctgagagtttattgaattcttaaccttcttcttattttttttttatttttttagcaaaaggtaagtatattgcatttaccaaaaaacagtatgtacaccaccacagcagccatgtcagaatctagaaataccaccgaaaaaatcctacacccaaccagagacagttatattatatcctactcctaagtttctgtacccaatttacatcaatattggtccatttacaagatatttttataattcacagaagcacatcagttttaattagtttaataatgacctctggatgaataaccaactcagaccatatagccttattcctggctttccggaagttgtacgccagagcagcaagcacagcaatgcaaacctgtttcttatacctccttttatgtgtcttagcccatctcttatagctagtgaagatacagtcgtgtgcacaggattgaaccccaatccaactagcgaaagcctcacaacattatgactataaatacatctgaagtataaatgctgcacctttttctcctcttgcctgcacggtatcagaacaaatcccagctttagctaacaattccctggttttcagtttattcaatgccatcatgcaagcaatgaaagaatgttttggaacattcagtttgttccaaacacagtgagagcaagggacctttcctgcagttccacttagccacttatatccctgactaatagtatgactctttgcaccgtaaattgatttcaacttaactttttcataagcagtgaattgtgtgttgttagagtgtctagctgtctaggagattgggagaaaaggagggaccaaggagatagaaacacacctttgtgtttctttgtgtatttactttttagggtgggtcacgttttctgagaaatttgggaaaaggaagaaatagtaacacactttcccatttgtataacctgtatactggagctccaatataatttgcatttttttttgagctgcaagaatatgttgacaaacagttattgcttcttcctcagctacaacttatgttggagccattcctttggagaaaacgctatgcttctaagatttctgatgagcatgctcaggaaaggtaatgtcaagacatgtgttacctcgccttaattttcgttccaggaggtgagcatgcatttagaactaaaaggcacaaagactgttggtggtcttgcctgttcaaatataatggagaggagttttcgctacatttaccctctcttgaagtggggttgaaatatagcatcaagttgaatgcttgattaagtttaaaggacttgtgtaactctttttctgtttactgtgattacatgacctggttgattaacataatggtctgtttatctgtagtgtgggtgagttttttgagcgacattttgggaaagaggtaatggtttaccatagtatttctgctttagtggtaaattgtaatgttgctgataattatacttcgctgcagtttgttgattatctaattgatccttttgtcgcgggtacaagtggaggagatcctcagtctctttctgtaagtgaacattttgtgcttcactcccaattttttggaggctggaaatagattcttttccagttgttctgtcaaaaatagatgtagctttattttgaatttgaagttcccaattgttcattttgactattactgattattgctaagagtggcattatgctattatgctcctaaaagaaaggtgaattttgacctacatatagtataatgtatcaatattggtttaattgtttgttcttttgttccttttggtgctcatcttgcgccttgttctcatcgctcgttttttcatgttgcacttgatttaaatttgctcagcttaacttgtctttttgaatttatattacttattgctatattttactaatttcgttgaaactaattttttgctgaacttttcgttttgttgaaatcatttttctgaattaacttgattttcctgaatagaattgaattttggtgatcttaccttttctgcagccttttatttctttcttgtcctttttccaatctcatttttttatatttccattgtgttgacatcttatcattaactgtgcagatgcgtcatgcatttccagaagtatggaatattgagaacaagtatggaccataagacgtttattttaatcgacatgtatgtttcttagtttatacatatattaattctgtggtaaaaaaaccgaacaagaatatctttttttttttctatcatcaaaaagggtgaatatatgtagaggaaaaagatttgaatcaagatattagcctaaagcaataataatgttagtaatagctttaataacaaattcaaaacgtacattaatgaaccgagaggccggaaaatagttaaagtgaccactaagagaagcgaaggattcatgatgggttttcaacccagtagggcaaatttgttcaatgttctttacaaatcaagcttattaccttgtgggtgtttttgctagagatgaatgatagaattttccctagttggaagtcttttttggttactttatgggagctagtgatgtaatttgtttcgccttatggcatttcctaacatgtgcttttgtgatgtattgaagctttttttttgccttaatttatgctggattttaattttgttctttgtttcatttttcttgcttttgaaaaaaatatatagatatgtatatattaggattggtcgaggattttgagggaagggaaagacctaagaaaacttggatgagggtgattgatagtgatatgagtctatttgggatcgaagaaaatattcctttggataaggtgtagtggagggttgagggagcaaatttatgcagattagcttgacttaaagtttttctttttgattatttttcatttacttgtgttttgcaaacatttactcatgaatgatgtaaacttcttcaaccaaatctctggaaaaaaataatctacatggaaaaaacattattaatgttaacttgacagagatcccatccttgtgaagcagctagcaattaggcatctaacaattgacattttaatggacaggatagaatgtctcttgatagtcaataccctctgtttcattgtatcccatagctactaatctagtttgtatctttccaaagaaccattattttgaagtttcaccttgaacacccattttgaaccaatatgtttcttgcccttggggagaggggctaattgccatgttttgatgcggatgcaaagacacttgttctacctgagcctattgacttgatcatggatactctagggtttgaactcaagggaaagaatcaagtcttggcatgtgtggtgacatggcgtggggatggagtaaagaagagtcatagttctgttaggatatgttcttgcttgctacatagaatcgtagttctgttaggattgctatgatattatatctagtagatagattttatagttaattaggataaacatgtgatgatcatgttataataggcatgtgattagaggataggattagcttaattcttatcttgttgttagtttaattcttatcctagttttatgtttatcttagtcgaagttgtagccatataaagggcgttccattcattaataatacttagttttgctttgtgttttaaacatacttcttgattattgtttgcttgtgagctaactaatcaaaccattaaagacttttcaggagttttagtgctaaacatcttaatttcaggagtgattttaagagcgtttagtgatcttgaatcaagaaatatccttgttcttgttcgactaatatcagtggttttgttcgagttcttggagttaatctcttcaagattcttattcaacttgattgttgagcttattggtttagtaatcatatcaagtggtatcagttttccagggaggagaggatagataggattctctttgatcaacaaagatccaagggctatcaacaaggttcaaacattgctgcttgttcaagacttgatctttttctaccaagatgcattctttacgtcacaaggtagtaataacaagattaagagtggtttttacatccaagaatcaatctttcacgtccaagatttcatctttcacgtctaagattcattctttaagatcaagaaagttataacaagcatagaagaacacataaccatggagtccgagatggacaagcttgccaaagctatgcaagcacttgcaaagtcgcaaactgaatcacagagtcgactcaatgagaatactaccacaatcaatgggattggtagtaacatgaataggttggaggcacgcatggatgccattgcaaccatcatacaaaagaagcttgatcggaatagtgccaacttcataggtgccaattcagaggaagagttggcagaacgtgaagaaagatcatccaagactacatacaatgatgatcgtggcttaaagttggatgactataatggagatagcaatcgagaagacttgttacagtggattcgacaacttgagaaggtatgtgattatagaggctttgatgacaagaaaagattcaggattgcctccataagactcacgaaatatgctggaatttggcttgaaagcttcaaggcacaacgagccaagaaaggtaaagaaaagttgtgtagttggacaaagttgaaagttcaagcttaaagagaagttcttgcctagtgactatgaacaaaaatagttcataagactctctactataagccaagacacgcttagtgtacatgagtacaccatggaatttgacaagctagggcttatatttgacatagaggagaaagaacaatggaagattgcaagatacatcaaaggcttgaaccgccacattgccaagaaggtggaagtatccacttatcacacctttgaggatgtgacaaagttggctaagaagtttgaagaacatgagaaggaagagaagcctaagagttcttacacgcctaagtatgatactaatgctaaggccaaggctagcttcctactcaaagtggtatgaaggacctaagaggctaagaacctcaccccacctaaagaagacacaagagttgagaagcctaaagtcgtcgttccaaaggagaaatttgaagagatgagaaagtgcttcaagtgtcaaggaaggagacacatagcaagcaattgtcctaacaaaagagtcctcaccatgagacaatacctagctttgcaagaagaggaggatgtctattagttcgtccctgatgaagagcaaacttaggggaagaagaggaggaggatgcttttgctgaggatgatgcaaggctagtaggggtcaagaggcgcaccttacatgtcgaccatacacctagcatggagcaaatggaaaaatcttttccacactagatgcaaggtaggtgactatatatgtaatggtataatagatagtggttcttgcactaatgttattgtatctgaggtagtgtcaaagctaaacttagctacaagggcacaccctaagccatacaagttgagtttgctagatgatagcactggcatgagagtaaagaaacaagctttgatttcattctctataggggttataaggatgagttatggggtgatgtattgcctatgagtgcatgtcatctcttgcttggaagaccattgcagtttgataaaaaggtcatccatgagggggactctaatgtgtactctgtgttggttggttctaagagggtatgtttgcatcccttagctcctcattcagtggcgccaaagcaaccacctaagacaccaagttactttctatcttcaagggagttcgaacaagaggtggaggaagaaggttgtgcttatgccttgattgtaagacatgctgccacaagtgtcaagactactagcaatgagaagctcgaagccttgatgaaagagtttgaggatgtctttctagaggaactacgacccttgagaggcatagaacatgctgtagaccttgtacctggcgcccctttgcctaacaagcctgcttataagtgtgatccagtggcatctagggaattgcaacgccaaattgaggacctaattgaaaagggctatttaagggagatcatgagtccatgtgttgtgccagctttactagttcctaagaaagatgacacatggaggatgtgcatagatagtagagcagtgaacaacattacagtcaagtaaaggtttcctatgcctagattggaagatatgttggataagttacatggggcatcaatcttttctaagattgatcttcgaagtggctaccaccaaatgaggatcagagaaggtgatgagtggaaaacaacattcaagaccaagcagggattgtatgagtggatggtgatgccatttgccttatgcaatgcgccaagctctttcatgagcttgatgaatgaggtacttcgtccgttccttaacaagtttgtggttgtttacatagatgatatacatatctatagccaaaatgtggaggaacacttgttgaacttgcgtagcttattcatgaagcttagagagcaccaactctatggtaagattgatggcgacgaggttgacgggggattatggcggcagtgaatcaccctctttgccggtcactgaaatacaacctgaggtatctttaaattctgtaattggattgactaacccaaaaactatgaaattgctgggaaaaattgctggatgtgaagttgtggtgatgattgaccctggggcaacccataattttttatcactagctactgttgagaaattagctattcctgtgtcggaatcggaaggatttggggtttctctaggggatggacaggcggtgaggggtagtggaatttgtagaggggtgttattgagtttaaatggtggagttgaagtggaaacagattttcagcctctgggtcttggtaattcggacgtgattttgggtgtacagtggctggagacgttggggacagtggagagcaattggaaaacacaaacaatggggtttgaaatcgagggtgtcaagttcactttgaaggtgacccatcactggcgaggtctcgaatctcactcaaagccatgatacgtaccttatgtaaagagggtggaggtttgtggcttgagttgaaccagattgagcattatcaggagaaaacaccgcattcatcagccttacctgaaattccagttttcttacagagagtccttacccaatttcagtctgtgtttgctacaccagaaggcttaccaccgataagagaacatgaacatgcaatagttcttagagaagggtgtaatccggtaggggtaataccgtaccgttatccacagttccaaaaagatgagatagagcgcctcatcaaagaaatgttggcttccggaatcatcaatccttccacgagccctttctcgagcccggtgatattagtgaagaagaaagatgggtcgtggcggttttgtgtagactatcgggccctcaataaagaaacggtccccgataagtatcccattcccgtgattgatgaattgttggatgagcttcatggggcaacacttttttcaaaactcgacttaagggccgggtatcaccagatccgggttaaggccgaagacactctcaaaacagcttttcgcactcatgaggggcattacgagtttttagtaatgccatttgggttgacaaacgcgccggcaacgtttcaatcccttatgaacgaggtcttcaaaccattcttgcgcaagtttgtcttggtatttttcgacgatatattggtctacagtagttctgccaggaacatgaggagcatttgaccttggtgttgcacaccctagcagctcataaattgtttgtgaatcagaagaaatgtgattttggcaggtcggaagtagcatatatggggcatatcatctctggtcaaggggtggctgtggatatggagaaggttcaagcgatggtggaatggccccttcctaaaaacctccgggaattacggggatttttgggccttacagggtactaccgcaaattcgtacttcactatgctcatatagccaagcctttaactgatcaactcaagagagatgcgtttgggtggtctgaggcagcaactcaagcctttgaaaagctcaagaaggcgatgatcacatcccctgttttggcaatgccggacttccaagagttgtttgtggttgagaccgacgcatccgggtatggtctgggggcagtgttaatgcaaaacaaccgacccattgccttttacagtaagttgttaggtgcccgggctcaattaaagtcgatctacgaaatggagttgatggccatctgcatggcagttcagaattggagatattatctgctgggtcgacatttcctcattcgtacagaccaacagagtttacgtcatctcactcagcagcgagaagtaagtactgccttccaacgttggatgagtaaacttatggggttcgattttgaaatacagtttaagccggggtgtgccaaccgggtagctgatgcattatcccgcaagacagtgggagaggttgaattgggtgcgctgatattaactcatggggtggactggaccgacttggagcgtgaaattgaaggcgatcctctgttgtgcaaaattaaacaagacttccacgggggtgctattactcctgtgcacttttctttggtggacaacaagctgttgttcaagggtcgatacgtgattcccagctcttcggtttttattcctaccttgctgcgagaatatcacgattctcccattggagggcattcgggggacctcaaaacatatctcaggatggctgccgactggtattggaggggcatgcgcaaggatgtggcgcggtatgtgcaacattgtagcgtgtgtcaacaacaaaaaatgtctcaacagatgccagggggggtactacaaccactccccataccttcctcggtttgggatgacttgtcaatggacttcgtggaaggcttgccatcttccaagggggtaaacaccatcctcgtggtggtcgatcgtttgtctaagtacgcccacttcctcccactacgtcatccatttactgctgtgtcggtggcaaatgtgtttgtcaaagaggtggttcgtttgcatgggtttccttcctccattgtttcagatcgggatcgaatttttatgagtgtgttttggcgggaattatttcgtttacatgacaccacactcaaacgaagtaccgcgtatcatcctcaaacggatggtcagtccgaaatcgtcaatcgagctctggagacttatttgcgttgctttgtgggggaatacccgcgctcttgggctcagtggcttgggccgaattttcatataatacttctcctcatctctctaccaaaatgaccccgtcaaggtcctttatggtagagaccctcctactgtgatacgggttaatcggggagcctcacctgttgaaagcttggaaaacatgctccaagagcgagacgcagtattagatgccttgcagattaatctgattaaagctcaacagaaaatgaagagtagtgctgatgctacaagaagagaggtgcattttaaggtgggagatcgagtgtacttaaaattacagccttaccgtcagaaatctttggcttaacgcccttatgagaagttagccgcccgtttctacggaccatttactattttacagaagattgggcaagctgcatacaagttacaacttcctgtttctagcaaggtgcatccggtgtttcatgtctcccaactgaaacaggccgttggttccattcccgtttcagccactattccagagcaattgtcttctgacttggagttagaggtggaacctgatgaactcctcgatgttcgtagtgtttctagaggccagcacacttacttggaagctctcattcagtggcagggattaccatcattcgaagctacctgggaagatgtggctgctttccatcaccattttccatccttccaccttgaggacaaggtgaaactttgggggggtggtaatgtgatgcaccaaactaccactccactactcacctattagaggcgtaagaaaaagggggtaaatcaggaatagtttacaaattctgttgaaaggaatattttgtaattatgatgtcagaggttgttagcaaaaaggcagtagagtaacaataaaaaggggaagggaggagagaagaaggtattgagatttttgtaaggaacttggcccttgggagagttgggagcctctcgaaagctcaccattatcttgtgaatattttccttcctggttatatacaagaaccttcctctgtcaatttcttttctctctaatcttatttcttattctgttttctggttgccattgtttgaagttgcttgttgtgcttgagtaaatacgtgaagtggtgaaacccatctgaattcatcacatctattccaagtggtataatacaagcttgtaatccaaatctaatgagaaatctaagttatgaagaatttcaaaagaactaagtacccttgttttggatgcccaaggatttacttgccgctcaagttaatgctcaacgtgcaagatacaacctctttagtatcccaaggtagtttccataagaattaattgagctcaaatcaagaacaatatttttatgtattaatgtgaacacttcctgaattatattagatatatggtctgaaggttggaagaaagattagcttttaattttaagtttgagatagtttttagaatcgaggaaagattagctcttaacttgtaaactaaggattgctttataagtaaaacattagttatggaactcttaaaattggttttgaacatttctagttaaaaatcccatgtaattctcccaaactagcttaaaatctcacatttcacaagctaaggagagacaaatggcgttctcttgtgaaacaatctaaaattttcattaggctactgttttcaagtatttatatgttagaagtgccgcatataggtacataaaataagtttacaaacacaagtaggaataaggaaaactaaaagagaaacttcagccatacaaaaccggctgaaatcagctactactttctactttctagcttcaaaatctgattgcaagtctcctttaagccaatcaccaatgaaaacctttcctccacatgaagtgtgctcaaatcaagagaagaaacccatcattcgcctatagctacctgggtcagatgaagatacggcaaaaaaaacgctggaaatcagtgaaccaaaataagcaccaattggatgctttctgtccttgctacattttcttctcataggactacttcaagccatacatgaataagcagttagatccagctcctagcatccatttgatcgtacaaatgagctccaaaaagataagtaaaaccaagcagccaaaacctaattaatactaatgatgaattagttgaatagctaatgacgatgaagcaacactttagtaggaatagtgttaattatgatcaatgctacttaatcttctgattaatttttggaaaaatgtcatatctaccttctgtatacacttattcataactatatcgtattattattatttttaaataactaccttttaagtaccaaaacctaagaaatcaggcacttgatggattccatccaaagatccatttggcggggcccactaactgacttttgattttttgcctttcctcttttggttaatctcaatggttcatcaataacaactcaatcttctccccatttcatcaaatcatccctaaatcagaactttttcaaattcacccaaatgaggttatggaaacctctaccaagtttattcgaccacttttagtctagctcaaagttttacacttgcttcaaaaactaagatttattaactttagaaattaggtttttatttttattttttatttaactttgtaacaatcttaaataactcaggtgctttctagagtttggctttaattgtttttcccttggttatgtgaaagaagtatgactactttctccaagactaaagtagagagcaaaaaatgcaattctggaatttcttgcaaaagaaaaggaacgagttaatgataatgaaaaacaaagaaaatgatgagaagagaggagctgaatcaatcatgatcatgtattttaaagttttttttgctattgaagtgacttaagaagaggaaagaggatgagtgaagacaaacaaaagaaaggataaatagagggaaatcttgggcttagaaaggtgaaaaggtaagaagatgagttagtgggccccaacaaatgtatctttggatataatccgtcatgccactgtttggggcttgcttaagtccatacattacttcactaattttacaaaatttattttcttgaccaagaactgaaaaaaccttcagtggtgatctattaggttttggaagttaaaaggtagttatttaaatgtttttaatataaaaggtagttatttagatatttttaatataaaaggtagttatgtgaataaaagtgtatataaaatgtaattttttgacatttttgccttagtttttcttgctaattcaccttttcaacttgaccaagttgctatgaggagaaaacgagcaattattaagcaaatcgcaacactagcattaatccatggcccatgaaactctccataattagagattggattagcacttagtagaacttcttgctcctgctccaggtttccattacttctttatctaagtgcatcaaaaggttgttgggttatgaaaggtggtggttgtgtatagtcattgtcaaaatgttgttaatgcactctatttagaggatgagggattgaatagttttcacctcgtgacctttcattcctttttaaaaaaattgataatgtgtattggtcctatgactgtatgaatggtaataagctatctcatgagctgttactatcttcctcagagtctaggtagaagggtttgggctgataattttctactatgtgcaattagtttgttggatttggatatgctagttgatataggtcctttcccttgggccttctcttaatataggcctacagtgtgattgaagataaatcttctggagaatataagaacaatgagatggattggttagaggttgatttgttcttttggtgtaagactatttcgggttctctattggttatgttcagacgccagaatatgtgttggtgattgttttccatgaacatactttatccgcagagacatttttcttttttcttcctataagattatatttgtttcctctcttggtgctcatctcagtgtctctactttacgttaaactgttgacattacttgacaatgcgtatatttgtcgcatggtgctcttccctcactccacgtcgaccccatacatcaaaaaatgccattaaagaatattcgaactcacaaccttgtgttgaaagaatggaatccctaccaatgactcattaattcattttctctttaagaaataaatgatttcctcacaaacttttaggctttaagagcccaaaagataaaaacataaaataagatagacatcaacgtcaagattagccttaaatgcacaaagcacatgtcaaatgattgataactactcacgagttgcaactctttgggcgttgcctaatattaattggatctcttttaaaaattgttggtggttatggttggtggagaggaccatgtaacttttagctggtcacaactggtaatgattgtcacttttactgcccataaaaaaatttaaactgttgaatatgtttctggcagtggatctgacaaatcctttacaagttggcgtccattttgttttgccatgtgactcaattataatacgtgagttttattatccaccaggtttggctcactaatttccggattaattcaatctaaactgtctccaaagaaggaaaagggtggaggaggaaagccttcttctaatgaaaagacacgcatacgtggttcgttttctttccagggtggaatgcaggtattagcatgtagctttcattctgttaacatttgtggttcttccagacatacatccaatgctttttttttttcttgctataaccataaacattcttgtcatgaacattctttaatactgttgctgagcttagtgtattcgttcattcatgtaatttcctctcttgaggttaaaatggcatacagccttacaacctatatccataatgctccttagagtagaatccctaggttataacatagtaccacttatcaaaataaacatggcacacactgcaggacaagaagtaaatccacctagagaactgagcacctagtagtaaaagcagcgatacattactaataacagtagcagggccataagagtagtaaatgggcctcatttcaacactccccccgtaatggtgagagagaagaagcagtctgaactcccagcttggagagcaaaatagagtgttgctgaacagggagaaccttagtgaaaacatctggcacttgatcttgagatggaacataggtaggctgaataaccccttcttcatttgtattgtccctcaggaaatgacaatctatgtctacatgcttggttttctcatgatgaactagatatgctgctatggcaagagcagcttggttatcacagtagataggagtagcactggactttttaatgcgaagatctttgaggagttgtttgatccacatcacctcacacacagcaagagccatggatctgtactctgcactgaccacaagaaattgcctctttgactttcaagatacggggggagtcaccaaggagcacacaaaaccagatgtagaatttacaacacccatcccattcactatcacaaaatgctgttagttgagcactagacttgttcgccatgagaattcaccctgttggcagcttgaagatgcacattagtggggcagtgcataaatttgcttaaatcatgtatagtgaaggcaatatcaggcattgccttgtaatagtgagataaatgagcttccccatcaatttttgatacacatcaggttgttgaagaggatcaccattgtcagcatagagcttgacatgtgagtccatacgaagcctcaatcgtctgcaatttataaaaccatattcatcaacaagacccatcacatacttctttagagataaaaacgatacttcactacactgatccacttcaatcctcaaaaaatatcttaggccacccatatctttcatgtgaaattggccagcgaagaaactctttgcttcctcaatagttgctaaactattgccagcaagaatgaggtcgtccacatacaccaatatagcactgaaacagtgagagttttgcttgaagaatagagagtagtcacacttggattaagtgaatacattttgctttaaagcagtgttagcttggcaaaccattgcctcaaagcctacttcaagccataaagtgacttaagcagcttgcacaccttagttcatttggtgtcacttctgccatcagtacttagctccccctctccttgaactttgatcctgttacatgtttcactatatcctggtgatagcttcatgtatacactatcctacaattcaccatgcaaaaaagcatttttaacatccatttgtttgcaagaaccaaccctctaaggatgcaacaacaagcatgtggtcatctttgctacaggggtaaaagtctgctcataatctattccatatctctgtctgtcacccatgattacaagccttggcttatgcctattatttgtgccatcagtgctgtattttgttctgatccatccatgtgagggatggctcatttctacaaaatcctagttccgttaggatttgtgttgttttcctaattctagtaggaataggactcctaaaatcctaatcctcctagttctgttaggagtttaaaagttttagtttgattgtaattctagttgtgttagaaatccaaatcctagattcatgtcacgtatggttagaacatggctagtaggataatttgtcttgtgatgtccatagccttggcatttgtggcacctaactttcaatagcttgtcttctgtctccttttctttctccttctttgaggaatcaacgtttttagagctatctaaaccactagcatcaatattaggtttaaaagtgctaaaagatttcgaatagttcttacttgcatacaatttctttttctagtttatgtagcgtcaccagggaacaaaaactcggccgttccgttctggaacggccgctttgtaacggatttcagagaggccgttccgttaaataccgttctagaacggtgatttggaattcacaccaaactcggcgcgatagcgttacgtaacggtgtaacggcgttccagaaccgttacaatcacataacgtccgttatttgaagaagaccagttcttttggtggaggaagaagaagagccaacgcaagatctatagatctgagttaaaatttgaaaataaaacatgtttttttatttaaattaaagcttacagaggatgtagaactcaaattcgagtaaacccctcctttaatttcattaggttactgcaaatcgaaccctaaattgcaaaccctaatttcgaaaaaaccctaatatgcattgggatgcaacgctgcttctccggtcatggcagagaaggtcgacgagtcatcttcggctgcttttagcactgtagctgccggtggttggcttgtttgcaggttagtgcttgctggttttctttctctcataccgatcatcttcttcttttctctcttctctttttcttttttattgtgtgactgccagtcacgtgataattgcaactcataaagtatctctttctctctcttcttttcatccctttttatttttctttcccttttagtttttattccctcacgtggaatcacctaattttcatccttttttatttttttagttacactcttacacagaagtatgttcaaatatcattatagtacctcaaatattgtatttataagagttttggacataatatgatatagaaagtaaaatagaagaaaaataaagtttaaatgtcacttgtgtgatttttttaaaaaaattcacgccgcgacggccgcgaaacgttctatttcccgttacaagccgttcccgcgataacgcgaccgttcccgcgaacgcgaccgcgaccgcgttttttttccttgagcgtcacatcttgcaagcttcttcaaaggtgagttatgtgtacaactccaatttctctccaatcccctccgtcctcatttaggcctccaaggaagctacttaaacattgatcttcaagttcatcaattttccaaagaatggataacttctcgaactcctttatgtaatcttcaacggacatattcccttgtttaagagtagaccattccatgtacaagctttgtttgtagttagaaggaacaaaacgtcctcttaacaactttttaagcttatcccaagtagagattttgggtttattagctttcacacgctgcctctttactccatccaaccaaatagatgcatatttggttaccttaagcacggccaccttgtatttcttttcttttggtgtctcttaatcccaagtagagcttttgcgtgtgaaagctaataaacacaaaatctctacttgggataatcttcttcttgtttccgaaacaactaattcttatggtagttaggaaagcaagaatggtttctaattcaatagggaatatattaattattattagtttaagttaaatagtgcacgaatctaaatagattattcgtctcaaaatctcacttaagtatagatttgtttggacatctgagggaagaagaagagagcgagataaaggagaattatcactcaatgaatccatatcccgagttttcccatttacttctttgaaagcaatatagttcacgaggtcttattatcagtctatggacataagagtaataatttaagggcaaaaactatgactttatgggtttaaactgatacatgttctgttaaactgatagatgttctgtgttaaaccgatactcatatattcctggttaaactgatagatatatgatttaaattgatacccgtctcagtcatgtcttggattgagacggtctgacacaagactttttgtgtattatatatctgattagaataaatttatcctgtttactaattattttatcttctccagacacttgttgacacaatatgcaatcagtttggtaaagatgaactcaaactacagtgcaaggtcctttcattgtcctacagtcataaggggatcccttcttcagaaaattgggtcgtgtcttctgtgtcaaaaaattccattgaagatcaacaatatgatgctgtcatcgttaccgtgagttttactttgcttactgctattgcaccaatctttcttcttttgacacactgataatggcaatgctgttgtggtttgaagccatgttatggggttttagggatatttatggagtctgatctaatatgttattggataaaattcagatctgtaacgtgactcaatgagattgaaaaaaattgaatcaagataatggattggaaaattaggagctaacctagggtctataagcgatccacttggagtctcataccaagcaggtattcgacattttaggtttatattgctgctatggctcatatgggagcctacatagggtctggtgcttattcctttttcttttgtctagttttggggctgcacatttctgttgtgttttgatatggatagccatcacctgcaattgcatggaggctgaactaagttctataggggagcaaacagtatctgttggaaatttattttcatattgtgtttttaaatgctataatccaaaatttgttgttcccctaaaatgcctaaaatacccttatgtaactgctccatctgtcccttaatagacttcccatttctccaatgcatgtttgccaatacacattttgtattgttaatatcaaaaattacatattagtaaaaattataaaagtttgattttcctaatgtacgcaatgagacgaatcaaacaagacgccatatgactatgttttttcttatacttcctatgttttttaataagtgacatgttttccttttagggaaatgtcacaataagtgacacatagctcaaagtagtaaaaatacttctcatttattacatctttgccattatttaattgtttcacctacctactttatccaatactcaaatttgattggttgaacaattggtcccaactttctctagactccttggtattccctttcccccactttctctctgtgtcacttattaaaaaatggaggacgtatattggaaaaaaattggaaggttttcttcacttatgaatagtggtaaaattagagatgggaaggctattttgggatggatggagtaatatttaaatttttaaaataatgtcattgttttagtgatgaaataaaattcaaggctattttttctagtaattatgttatctgtacatcaccacacgtatcgcgtgcatataagactagtttgatgatattccaacactgttcgaaggaagtcaggcatggaaccatgtttgcttccatatgggaaatattttgcttactctccttcaaacatctacctcattatcccagaatgattgatcgaatctaatacaaatatacaattgatcatatgccaccagggaattacatcaaattaaatttttatagaaggggaatcagtcatagcctcatagggaacgaataagtgatactcgccagtttctttcctggttacttttcctcttctcactagccatcctttatgtatgggtatgctgcatcattcctgccactggttgggactcccgtttgaactatggggggatgggaaagctaagccatcatcttcaaattgagtttcttgagaatgtaagacaccatctgtaagatgaatatagtgcactctatagtcaatgtcatgatctttatgggtttatctgctgaaataactgtgatatacccagctctccatttacaaagttttcctacatattaaactcttgcccgcaattctagaacttcattgtagaacttttcctacataagcatcatttgtcttttctgtagtaaaagttagaaagagctttattttagaacattcgtttttagttttctttgttgttgattactccgccacttttaatacttttatgattcaagtatttgacaaaatcatgtaatttaggtcctctgctgcatgcagtctataccctctctctctctctctctctctctctctctgtggttgtgtcttacttgttgagttactaactccagccattacataaagtaggctggcattatgatgagcaaattactcaagaccacatgttagctcctttttcttttctccttattctgaaaggcaaatataggtccatcttggtgcttctcatgtcataagtaagctgaccccctccttttccagggaataggacaataatccaaaagtgagggttttacatgttgggatttgtgaagtttcttattttacttaatagccgagtcagtgttacaatacatagtaccgtgttacaaaatagtatgtaacaccaagcatgtttatgtgcaaaattgtgcaagactttgttgctggcacgccaagggctgttttaatgtagtttacttattcttttaggtttttcagatgacaatcataaagggaattaggagtgtttttattgtagtcaatccctattgtgctacaacgataaaagaaaaaagcacaagactagaaggagaagtaatgtctaggaaagactcctcacctggggttgctagtcacctacacatcttagaaggcatcaaaccaaagcttattcccctcgactgttttcgggagaaaagaagacaaaattgtttctaacttatactttaccagtttcactacagcatcagaaagaagcaaaatatgctcccacaacacggcgaacctagctttccagatgtgataaaccagaccagcaaaatgattattttcactagagctttgagtctattttttcggtttttccccttcttcctggtaatgtcacgccaccaagccatcatctcaattttttgagatttgacgtaatcgctcaaatagctgagtaagacacttcttgctctaaatactaataaaaaagaggtgaatgtgggtctcagccatgttactcaaatcggataaagtgtctactcttattagggtttttgggtgttggactcatccatttttttttgtaaaatgtcaagattttggtttgaaatgagagattcaagtgtcgtgacatgagtcggcacgcaacacttaaacgtgtcgaagtaacagagggtctcagacaatcaactttaatcaatcacgaaccccaaaatttatgcaacctttgctcatattcagtctctgtaaagcactcaactgcagcacacccacccattcgcttcacctacagcaggagggcacccaagtaattgctatgatgagcgaattattctgttttgccttgctggaatattgctgttagatttgctgactcactggcagttaattatagtcagagaatgagaaatatcctgtagagagagaaagggtatcttttgtatttagctctataaatagctaaggaagggaagggcattgagagtttatgatattataataggagagatttagcctctcgaatgctgataggagcgtagctcttgttggattatcaatactactctgtttgctctatctatttctactcaggttccttcttgtacagtggatccctgattggatttacttcatcaaccagcagataaaattatttgtaggcacattgaaaccattccaaacctaatgaggccaaagtttatcacaaagaatataggagccaaatgtaggcaacagataagagtataattgccagaagttgaagactccaggtattgttcagaaaccttaatgcatatcatcattctgacactagattttccccggagccaactaacaaaaatgaattaaagagattaaggctatgtttagttcacctgaaattttctgatctgaacttatctgatctgatctgaacttattttttctgatctgatctgatctgatctgaaccaatctgattacaagatcttatcttttagatttttctcaatatataagaaaaaatatagtcatgtggggtcttgtttgattcgtctcaatgagtactttattaatattcaattattataatttttactaatatgtaatgaaagatataatgatttttaaatataagcatgatctgaactgatctgatgtgaacttattttttctgatctgatctgatctgattagatctgaaataagcaaaaataaggtgaactgaacatagcctaagcaacaattgagggaaaataagatcattatggctaagataagataaatatgtaatgataaaatcagagtaattatatcagttacactctcaacattcgtcagattgaggtttcctcccaaaatgccaacccacttttctgtattttcacgtccttctctctacccttctaggtatatattacatcagctgtaaaatttttgaaccaactagtagaatactgatctaccctcaactgcctcactttctcattttttctgggcctttttctctctagcacaagtccacataagtgatgcatagcagaaatataattccactagtcatcctcaatattgatataacaaacacatcacccacatattatcatttttaatcgctgcatgcgaggcatacttacccaccaatcaggatatgcataacagcgttcctaattccaaaaccaccatatatcttgggtttgcaactctcatccctagcaacaaggggactttctgaaaaagtggcagattccgcccacaagtagtttgtacggacacctttattatattattaatatcatatttcggcaacacaaattaccagcccagtaaaacatgaattgacatgagactaacaaggggcccaatctaatatcgtacgtctgtactaagcaatgtataaaaaaaagctcaaggtgcattgatgcaatagggatcctaatgtgcataggtgcgcctcattgaagtgaggcaccactaaggataaataaaaaagattgatgtaaaattaaattgtgcaccttgggtgcgcctcgatgaactttttttgtgtgcctaagtgtacctcaagtacgcctcattgatatcgcctcgcctggcagaaaacgagcttgaccccaatcgccttgctccccaccgcctaggcgtgcctcagtcacactttttaaatacattggtattaagtactcagaatggcaaaaagaaactttgggcattaattagacatttcactttttgtgcaactatttgtgacttcagagattgatatgttttctacattacagacttttgtgatggctgcatggtctccactgtcaaagaacattagtttaagtagaagaaatattgctctattaccttcctccctctacaaacaaaatcctaaaatgtggttatgtagtgccaattcaaacttgtagatgcatgactaatgctttcattatgctgtgggtttttatactatgattcatgtccaattacataacaattagctggagtcaggatatgtcacggaaattttaagcctggcaggatgattgtttatattttctctttttcggtgtttaagtcaaagtaaacttctaggctgctcttttataggctagttgggctgttggggagatctacacattaagtgtgaagaaatcttgtctaactccagtttggttgagaactgtaagctgtcataacatttgttgcatgatgaggccttgtgggattatcatgttagctgtaaactctaaacttacttgaaatctagtgttgtgtctccttatttctgtagtcaaaattgaaccttctgtacgtttttgatacctgcgactagaatgatggaattctgaattactgatactattacaaccatctgctaagaacgaagatgactcttagctaatttctcagcagatttagagaaattaagaagaattactaatgaatatttaaagagaaaactaccaagatatgattgtattgatgaaaaacaccaattacaacctaaccaacattcgagaggttggagctctcccaagtaaccatttctctcactaaacttatcaattttcaagatgccttttccattctcagttcctctatatttatactactccccttagcaaactacccaacttattccccaagtaaactaaagagataatatctaaaatacccttccccctacaataatattagttcttagcattaccggccccctaaacttccaccttgtcctcaaggtgggtcgtaatcatcactaaattctgggcctctactcgtatattcagtgtcttgcagcccttcaggccccaagcctaggttatgcagctcgtgttgcggctcctcctcatatagttctctggctggagtgagtgcctcaactataatgaaaaagtcctggaggtggggaaggaaggagtgtctgaaatggtgtggtgtgctgctggtgttatgggcttgtgcctgaaagttttgggtttaaagagatggagtggagaagagtggagaagtgactggagacgtaaaagaaggaatcataatttttgtaagtggtgggttgaaaaagttggtgggaagaattgtttttataaaatgtagtgtaatggtcgaaaaatgggtggagtaagtatggtttttggctggggatgtggtactgggttgaaaataaataggtctgagcttacttgtaaaattggcctcaacatgagcaggcccaatatcttgagccaattccccaaaagctggcaatagagcactcttaattgcattgttgtgggccatcgggctccaaacatatattcggaggagccggacttctttggtgatgtcattagcttggcccattgcacactttcccttaacagcctcaagatcttttcccacttttgtaccccaaccacgtggcttcaccatcctttctttcttgcttttgtcacttttttggcaatatacgagtttgtccttactaccctcatcttctaatgttggcttcctcaccaagcttaatttctggaattttgtccaccaaatcccaccacccatcgtcaacaccatacctatctacaccggccaagaagcctggtcctccacccgaattttcgccacagacaaagcctgaacaaccgtcagttctctcaccggagaagttcacaggtccaccacctgacccactagttgctgatccacccttcacaaatctccctcctctggctgccacaagtagtggttcctccgtaatactcatatttctcgtccaagagccctggaccaccaccggacccacttccaccggcaccaacttgttcaaatgatacttctctttcttttccaaacagcctacttggactggaaaaaccactgcgattgtagcctccgccagatctgtagcctagtgcacctaacgtgcttccaactgcaacccaatagggatggaaatggatgggattcggggagggtggagcatcacccgcatccgtcacccgcatccattcgctccacccgctccacccgcatccatccatccgtcacccacgggtgaaacgggtgggtcggtgataaacgggtggaaccatttagggggtgtttggtatcatgtttttttacaaaagaaacagaatcaagtaacaaaatccgtttctacttgtttggttctatgttgctcagactcgagtacccatgtccgacacgggtacgtgtccaagtgtccaactcagctattttctagaattttttatattttttaacccaaaacaaagtgtccaagtgtcccacccatgtccgactcccgaggatccgacacgggtacttgaggtgaaatgaagagtccgagcaacggaggtttggttagtgtgtaaagtaacaattaccgttacttgaggaaaacacatccccccaagttgtttccattcaaaaacctaaggaaacaaataacgtttcactcctcaaacaagaggaaagggaatgggttatatttatttccattccattaggataccaaacaactaataagggtaacacttattattatcctttcccctccttatcaaaatcctttccattccgtttacggtattcataccaaacacccccttagtatattttctaatgaaatttgtgatatgatatgcatgatataaaataattctatcaaaaatataaaaagtaagtaaacttacatgtacaacttaatagatgggtgatgggttggaggttaaacgagtgatggatcgggtgacgggtgaagaaattctcacccaccactcgctttccatccatttaaattaggtttttcatccatttaaaaaaccgggttaaacaggtgatgtatgatccatcacccatttccatcctcaaacacatcccgatttgtttactgcaccaccagatccaccagtataaccacccgaaaaatcatcatgccttctactagccttgtaacctgctcccggtgagaagcttcttccacaagtggtggtcgctggacctccatctccttcttccccaaaaaattttccatgacacccactcgacccttcatctgtgacaacctcttcttcgtccacctctgaagttttggggtcgtcttcctcctcaagctcctcttgaagtaactttaacttccgttggatgggagagaacgcttcattgattatcttcaccagatcttcttgaagtttctcgaaactttttctcacgttttcctctacctctttcgtgatttcctttccgatctccttcatttttagactaggagctcttgcgattccatggcagatttctttttttaaaacaagaaaatcaggcacttaatctcccagaatagtggtgctctgataccattttctaagaaccaagatgactcttagctaatttctcagcataacaacaaatttagagaaattaagaagaattactaatgaatatttaaagagaaaactactaagatatgattgtattgatgaaaaacaccgattacaacctaaccaagaggttggagctctcccaagtaaccatttctctcactaaacttatcaattttcaagatgccgtttactactccccttagcaaactacccaacttattccccaataaactaaagagataatatctaaaatacccttccccctacaatattagttcttagcaccatcaaactgggatggatggttttgtaaggttccaatttacttctccatcaaaatattttaggattttttatctcatgtattttagagtttcctcgtccctttttatctgataagattcttctgatgatttgattttatggtaggctccaatcagcaatattaaagaactgaagattctgaaagctggagttccattttcacttgacttcattccagaggtttgtatttttatagtggttagacatgcttcccctagttttcaaagtaaaagcatccttgttgtgacgatattttttcccttgtttttgtttttattattatcatcacttatttccattttctattttccatgctgataagatgttcatcaccataatcttgtggtatcagaagtgtttagtggagtttattcactacacatgcagttgttcttttgccatgaccgccattcattttctcgtcaaaacaaatctatgaagtttggttttcagactcatggttcttgtagctcttgtgaatttttttttcttctccttgcatgcattcttcaaattacatattgcatataccaggtgctctcctttattttatatttaatttttaaaattctatcatatattttttaatgtcaaacctcaaactaggggttcactgcatcttaggcttaccaggctaatatttctttacttaaccttttccctttatatttgctatcctcttgtgtagtaatcaccataagaagggtacaaactaaattaccctcccattcttttgtatcattctgaaatagtgtcacagagctttgatttttttgccctcatttaatctggcaaatgttctctctatttttttttttttactttcttttgacgggattctcaggcaattgttacggggagcagccagtcacactgtttctgtttattatgcaggtgagttacctgcccctctctgttatgattactgcgtttaagaagaccagcgttacaagacctcttgagggcttcggagttcttatcccttcgaatgagcaacataatggactgaagactctcggtaattgtctggttcacgtgtgtagcgaatcagattttcaaaccctgatttcgtaacattgcaggtactctgttttcatctatgatgtttccagatcgtgctttctccgatatgtatctctatactacctttgttggaggaagcagaaatagagaacttgcaaaagcttcaacgtatgagatatgcaatgttttaaatgtatgctatagtcatcgtttcaaccttttggtgcctttttcttactaatttatcctcctggtttaatgatcttagggatgaattggagcaaatagtttcgtctgatctccaccagctgttgggcactgagggaaaacctacttttgtgaagtattgatatctttcacccaacttaacatgatttgtgcttataatatgttaaataaagtaactgaaatcctgaaattaagactacgaaactgtatggtgacagtcatttttactggaacaatgcattccctttatatgggcacaattacgactcagttctgagagcaatagaaaagatggaaagagatcttcctggacttttttacgcaggtaatctgtcatttgcttgttgcgataaagttcatgtacagttggcatatcaatcaacttgcattctttcttgctaactccaaacaatcaggatcattaacttgtaggctgcagcaacagagagtatctcccaagttgttaggtttcatgtaacctcgtcgctgagatgaaatttccgttggctaaaaagtgaaagttttgtattgatgttacccaaaacaaaagtattttgcatgttgcttgaagttttggttgtttcagatagtacatcctttgacatgaaaataaatggaaaagcgtatgtcaagcaattatcatctagtttctttgtttctagatactagccgcatttgatcccagatcatttttgaggaagtcagctgaaataccgtagctatccttcagttttcataataaaactttaatggatctgatgtacagtaatttagtgtgcaccgggttaataattgatattaacttcatatagtgagtcttataaagatataatgaacttatatacaatatagtggattttattaatggaaaacatatagtgaaactatatgcaatatagtatgatacataaagacttagacaacaagagcattcgaaattacaaagaacaaaggaaagaacaattgtatcaaaccggttcgaatgaacaaacaaccaccacttccacaatcaatgtaccaccaatcaagactaaactataacaatgagcttctagtttaagtctactttgagttttaatcaccaattcaacgattagatgatcaaaattgcaaaggttaagagttggtcaaacctaaccaagagttacactaggcacatagctttgttaggagtatattagtttatgaattctagttaagttagaaatccaatacctagttggattaggattcctaattggattagaattatagtttagttagaattctagtaatagtaggcgtgtgattaggagatataattagcttaattcttatattgttagtttaattcttatcctcgttttaggtttatctttagtcgaacttgtaccctatataaggggcctttatttcattaataatatagtttattttgagtttaaacctttacttgtgattgtttgcttgagaggttattaatcgaaccattaataacttttcaggattgttaagtttttagtgttaaacatcttaatttcaggagtgattttaagagtgtttagattcttgtattcaagtttcaggactgatcttgaatcaagaaatatccctagtttcgactaatatcataagtagttcgaattcttggagtcttttcttcaagattcatattcataacttgattatttagacttcttggttttgtaatcatatcaagtggtatcagttttccagggaggagaggatacaaagggttctctttgatcaaagaagatccaagggcatcaataagaatgacacttgcaataagttcgagtgatacaaacaacttcaagactcgatcttttgctaccaagaaccaatcttgacgcctgaagattgttaggacaaaggataagaagtgtttctacatccaagattgcattctttacgtccaagattgcgtcaagatccattctttaagttcaagaaaggagtagaaagcattcgaacactacttaaacatgacatccgagatggataagctggctatggccatgagtgccttggcacaatcacaaactgagtcacgcaaccacatgggtaggatggaggcacgtgaccgtggattgaaactagatgactatagtggagatggcaatccagaagacttgttggagtggatttgccaactaggcaaagtgagtgattataggggctttgatcacaagaagagattcaaggttgcttccattaggctcacgaagtatgctggaatacggctcgaaggattgcatgcacaaacttcttgcctaatgactatgaacaaaaacagttcataaggctcgcatcaataagccaaaacacacttagtgtacacgaatacagcatggagtttgacaaattagggcttatatgtgacatagaagagaaagagcaatacaagattgcaatgtacattaaagggttgaatcgatatatagccaagaagatcgaagtctcaacttatcacttctttgaggatgtgactaaattggctaagaaattcgaagagcatgacaaagaagaagggcctaagagttcttacacacctaagtatgactctagtgctaaagggaaatcaacagttccctactcaaggtggtcggaaagacctaagaaccccactacacctaaggaggacactagcatggagaagacaaaagtggccgtacctaaggagagtttaattttgtgttttatacatctttgcttaagagcttaacaattgaaactattaataacttttcaggatggttaagtttttagtgttaaacatcttaatttcaggagtgattttaagagtatttagattcttgtattcaagtttcaggagtgatcttgaatcaagaaatatccccttgttcaactattataattgatcttattcgagttcttggagttaatttcttcaagattcatattcatacttgattattagacttcttggtttagtaatcatatcaatatcattagcattaatttacccccagggagattaagaaaggattagcctaatcaaggcgcttaagaagtttttaggaaaaatcgtgcttgttaagcttaagaattgaacttctttcaccatttgcccttgattctcttgttgaactagaagatcttggttcatagtagatgctcctgcatcatagtagagcatttaattttaattttttaacatgcacgaagatgtaggtagtgtagtatatatcgtgagacgtggtttaacatatagaaagatgtagtttctgcatgatatagtgagtttttgcatgatatagtgaatgtctgaatgatacagtggatcgttccgaattgttgtagtttgtatgatatagtatttttgtgaatgatatagtgagtttcttcatgatacaatgggtttctgaatgatatagtggattgcttagaaatgatatagtgagcttttgtatcatgtagtaggtttctatgtgatataggttgttaaaagatgatacatgcttttggcctcatgtactctaatgttaacgtgaacccggtccttgcaagtcaattgcagttttttcaatattaagctatttttttttttttttttttttttttttttttttttttgtacgggaatatttagcatctttaccacaaacataaccatacgaatattatgcggaaattccagtctgaagtcttaacttttcaaaattaaaagcttctatattatttttggaatgaaaaaaaatgagctatggcatgttattttgaaatacaatgagtctcaaggtgcatagtggcttcaattctacgaataatgaatggactactgatttctaattttttgttccgggcttttgcattaggtaaccataaagatggactctctgtgggaagaactatttcctctggatacaaagctgcggagcttgtgatatcctatctcaactctacttaagatgcctaaatgatcgaggagactccgtaagtcctttctctgattctatctttgaactgagtggaaacacgactgtggtctaaagtagttgatgtctcagatatccagaaatggcgttagtgatattcaggagctgtccattgaccctttgattcattgttgcagtttactgaaagttgttagctggtctcagaaaaacgaaaggaaaaaagggggaaaacaaaaacaaagaaacgtagattgtggtgttaaaatcaagaattccagagatttgtaccttctttatcagttgaattgtttacagtgtgaatcaagaagttagctcgaccttcttttcttgtgaatggtaagatttcgtgatcatcaatacttgattgtgctgtttgcaacttcaacggtaagatttcctgatcttacagtttaattgcttgtgctgtttgccactt

SEQ ID NO: 2 - DNA, 1575 bp, Beta vulgaris
  source 1..1575: mol_type = other DNA
atggtaatgctatacgattctcacctctcaggagtctcaactcatcttcaactatcgcaggcatttcccaggaagaacccattaatggccaaagtgtctgagccgggtaaacccacttctgctaaaaggattgctgttgttggtgctggtgttagtggacttgctgccgcatataagctaaagtcccatggcttgagtgtgacattgtttgaagctgatactagagctggaggaaaactcaaaactgttgcaaaggatggtttgatttgggatgagggggcaaatactatgatagagagtgaagcggaggtcacgagtttactcgatgatcttgggcttcgtgagaagcagcagtttccaattgcacaaaacaaaagatacattgcgagagacggtcgtcctgtgctgataccttcgagtcccattgcacttctcaagagcaatatcctttcagcgcaatctaagctacaacttatgttggagccattcctttggagaaaacgctatgcttctaagatttctgatgagcatgctcaggaaagtgtgggtgagttttttgagcgacattttgggaaagagtttgttgattatctaattgatccttttgtcgcgggtacaagtggaggagatcctcagtctctttctatgcgtcatgcatttccagaagtatggaatattgagaacaagtttggctcactaatttccggattaattcaatctaaactgtctccaaagaaggaaaagggtggaggaggaaagccttcttctaatgaaaagacacgcatacgtggttcgttttctttccagggtggaatgcagacacttgttgacacaatatgcaatcagtttggtaaagatgaactcaaactacagtgcaaggtcctttcattgtcctacagtcataaggggatcccttcttcagaaaattgggtcgtgtcttctgtgtcaaaaaattccattgaagatcaacaatatgatgctgtcatcgttaccgctccaatcagcaatattaaagaactgaagattctgaaagctggagttccattttcacttgacttcattccagaggtgagttacctgcccctctctgttatgattactgcgtttaagaagaccagcgttacaagacctcttgagggcttcggagttcttatcccttcgaatgagcaacataatggactgaagactctcggtactctgttttcatctatgatgtttccagatcgtgctttctccgatatgtatctctatactacctttgttggaggaagcagaaatagagaacttgcaaaagcttcaacggatgaattggagcaaatagtttcgtctgatctccaccagctgttgggcactgagggaaaacctacttttgtgaatcatttttactggaacaatgcattccctttatatgggcacaattacgactcagttctgagagcaatagaaaagatggaaagagatcttcctggacttttttacgcaggtaaccataaagatggactctctgtgggaagaactatttcctctggatacaaagctgcggagcttgtgatatcctatctcaactctacttaa

SEQ ID NO: 3 - protein, 524 aa, Beta vulgaris
MVMLYDSHLSGVSTHLQLSQAFPRKNPLMAKVSEPGKPTSAKRIAVVGAGVSGLAAAYKLKSHGLSVTLFEADTRAGGKLKTVAKDGLIWDEGANTMIESEAEVTSLLDDLGLREKQQFPIAQNKRYIARDGRPVLIPSSPIALLKSNILSAQSKLQLMLEPFLWRKRYASKISDEHAQESVGEFFERHFGKEFVDYLIDPFVAGTSGGDPQSLSMRHAFPEVWNIENKFGSLISGLIQSKLSPKKEKGGGGKPSSNEKTRIRGSFSFQGGMQTLVDTICNQFGKDELKLQCKVLSLSYSHKGIPSSENWVVSSVSKNSIEDQQYDAVIVTAPISNIKELKILKAGVPFSLDFIPEVSYLPLSVMITAFKKTSVTRPLEGFGVLIPSNEQHNGLKTLGTLFSSMMFPDRAFSDMYLYTTFVGGSRNRELAKASTDELEQIVSSDLHQLLGTEGKPTFVNHFYWNNAFPLYGHNYDSVLRAIEKMERDLPGLFYAGNHKDGLSVGRTISSGYKAAELVISYLNST

SEQ ID NO: 4 - DNA, 37006 bp, synthetic construct
  misc_feature 1..37006: note = d209 mutation Beta vulgaris PPO2
  source 1..37006: mol_type = other DNA
tattccatcgaatgtagcaaattgactgtccgttgcaatttcggagtttccactcgtcgcatggtaaatggtaatgctatacgattctcacctctcaggagtctcaactcatcttcaactatcgcaggcatttcccaggaagaacccattaatggccaaagtgtctgagccgggtaaacccagtaagtcaaacattcgaatcacaactcaagcaaatttgtcttgtttgcgttatattttgctcatttcagccttttttgtttttccgacctttgcatactgaatattgtgtgtgtgtgtgtgtggggtttcagcttctgctaaaaggattgctgttgttggtgctggtgttaggtaaattttcgtctcttgcagagtttttgagtcatttgggaattctatgtgaaacttgtaactcccttcagtccaacgaacgcagtacaattttctatcaaatcatggtcctaatttccaattttccatatatattgttggaattatattgggattgtctatcactattaatagtattaggatcaattgtagagaagcacagaaatttttgggatcgaaagaatatctggattgccacattaacagcagatataattcttccaattggtttttggttcttcctaccttgacttgtctggtcaaacattataaactttaacctttaatatccattaaagtaaactataggatttttttgtctaaaacatgcttatataacatgaaatttgtgagaaaccaccttatatatatttttttgcgaaaacaaaccttaaacaaaattattatcgtgagaacaaaccttatgccaatttcgatcattgacccaaggttttggcattgaccgtgtcatgaattttgttgggtttaaaaagtcatgtgtcttgcatacgaaatggtaaatgcgggaaccttgggtcaatgtttggaatccgcataaggtttgttctcccaaaaaatgtttttgttcaaggtttgtttttgcaaaaaaacttatataaggtgctttctcagaaatttcatgttttataaagtagtatttgacaaaaaaccctaaaatatattatagaattattattgactaaattgtgtaaaaatgtactcttctaaaagtacattatagtattttagtggaacatttgcgagaaactactttataaatacgatttttgcgagaaatttcctaataaaaaaatgtgaagtgcaaaactatcttattgataattttctactccctcaaatccaaaatactatgaagtctttcctttctggtttgtcccagattagtttgtacgcttccatctttggtatgatcccacttttattatacttattagttttacgtgagttccttactctatctcttttaacaaaaatactcaactatctctatccaataaaaagttccttactagtcctatcacatctgctttttaataaaataacgtttgataaccacacaacttatatccttaaaatacacgttcaaccaagtgttgagattaatttggacggagggaataaatattttttgaggcatattggtagcagtattcggattccgataggttgactatgtttccaatgttgaccaacacttgccttgcatgtaattctaactttgctcttttttattcttcatttccctcgtattccatatacaatgtttagagacccattccttcctcttctcttctttcccttccttactatgctttgccataatcttcctcaaatgagtgcaaattaatttgtcgttgatgtaggccaactgattgtagcacatcttcatagttcatacctcaacacactcgtaattatattataccctacatgttaaatggctcatgaagctttattttatatcatacttcctccgtttcacaataagtgtaacacttttcttatttggaataatcacaataagtgaaaccaagctccaaatggtaagaaaagttcactcttattacaaatataccaccaaaaagtaagaggggatcacaacttcaatacttcttcactctactttattgtggtcccaactttctctctctaaattccttggtaactccccactttctctatgtttcacttatggtgaaatggaggaagtattttgtagtggtatttagctactaggccttggatgatatacaatcatacaatgtatttatattcacgataatttgctgcccaccttgattaccatgatttccaccaattttatcaatttcagtacttcaccaccccgaatttatattttttatttccaaccttggtatctccatttgtctgagtgcccgatccatttgtatcgcctccagaattgaagaagcttcctgcagctagacaattaggaaggttaaaaaagtttggagatggtggaggatagccataataatcattgttgggaggtggaacttggaaggttattgtagggttgaagtccttgatgaagaagaattgagttcaaatgagaggaaaaaggagcagggaagagggacaataagaaaaaaaagggtaaactaaaatcacgtgtaaggcatgtgcagatcaacatcagaaagcatagtcaacctactggtattagggcactgatacctttttgggtcaaaatttttttacaaggtatttcatgaggtagttttgtccatttttttttttacaaggtatcgtctcattttttttttatcatttagtttctcgcaataagtgtatttcatgaggtagttttttccaaaatttcctcatttattataaaatacctcatcttttccataaataatgcaatgtctagacttttacgctgtttacacatgctcctttgaccatctattgacacacaaggaaaaatagagtagagtcatgcaggatcttgttagatttttctcgatatatactttcaaaagatcaatttttttataattttttttttgaggggattttttttttataattatgtacttatcaaaggtcaaagttgtgcaccgggaagcataaaactctatgtgttgcaatttacatggaaggggaggagtataataagagaaaattatggtaaaaggttcattcctggagatcatgagaaaggaagtagaaagaacaaaaaagaacaatgggagtgcttttcaatgtttgttgtacgtagcatttattcatttgctataatgttttgtgacattgtagtggacttgctgccgcatataagctaaagtcccatggcttgagtgtgacattgtttgaagctgatactagagctggaggaaaactcaaaactgttgcaaaggatggtttgatttgggatgagggggcaaatactatggtaatgtttttgattattgcaggtcttgcactttagcgcacaattaatttctggatttttttttgtactgtggtggttatggtcatcaacatgtctcacccactgtgcttgcagatagagagtgaagcggaggtcacgagtttactcgatgatcttgggcttcgtgagaagcagcagtttgtaagtctttcattatctgaatggcacatactttatttcgaaagattgtaattgccttttctttctagatggcttcatcttcatgttgctttctgattcagtttcgtggctaactttccaagtttgtctgattgctaactctgtcatagccaattgcacaaaacaaaagatacattgcgagagacggtcgtcctgtgctggtaagtttgcttgttttacttttgacctcttttaagatctttcaactctggagcctggaaacatggtgatgcaggaggcaagttctctctattttacatcctttcttctctgtatcttatgacatttgcctcttattctgtgcagataccttcgagtcccattgcacttctcaagagcaatatcctttcagcgcaatctaaggtcgttttatgttaagacatacttgatgctgagagtttattgaattcttaaccttcttcttattttttttttatttttttagcaaaaggtaagtatattgcatttaccaaaaaacagtatgtacaccaccacagcagccatgtcagaatctagaaataccaccgaaaaaatcctacacccaaccagagacagttatattatatcctactcctaagtttctgtacccaatttacatcaatattggtccatttacaagatatttttataattcacagaagcacatcagttttaattagtttaataatgacctctggatgaataaccaactcagaccatatagccttattcctggctttccggaagttgtacgccagagcagcaagcacagcaatgcaaacctgtttcttatacctccttttatgtgtcttagcccatctcttatagctagtgaagatacagtcgtgtgcacaggattgaaccccaatccaactagcgaaagcctcacaacattatgactataaatacatctgaagtataaatgctgcacctttttctcctcttgcctgcacggtatcagaacaaatcccagctttagctaacaattccctggttttcagtttattcaatgccatcatgcaagcaatgaaagaatgttttggaacattcagtttgttccaaacacagtgagagcaagggacctttcctgcagttccacttagccacttatatccctgactaatagtatgactctttgcaccgtaaattgatttcaacttaactttttcataagcagtgaattgtgtgttgttagagtgtctagctgtctaggagattgggagaaaaggagggaccaaggagatagaaacacacctttgtgtttctttgtgtatttactttttagggtgggtcacgttttctgagaaatttgggaaaaggaagaaatagtaacacactttcccatttgtataacctgtatactggagctccaatataatttgcatttttttttgagctgcaagaatatgttgacaaacagttattgcttcttcctcagctacaacttatgttggagccattcctttggagaaaacgctatgcttctaagatttctgatgagcatgctcaggaaaggtaatgtcaagacatgtgttacctcgccttaattttcgttccaggaggtgagcatgcatttagaactaaaaggcacaaagactgttggtggtcttgcctgttcaaatataatggagaggagttttcgctacatttaccctctcttgaagtggggttgaaatatagcatcaagttgaatgcttgattaagtttaaaggacttgtgtaactctttttctgtttactgtgattacatgacctggttgattaacataatggtctgtttatctgtagtgtgggtgagttttttgagcgacattttgggaaagaggtaatggtttaccatagtatttctgctttagtggtaaattgtaatgttgctgataattatacttcgctgcagtttgttgattatctaattgatccttttgtcgcgggtacaagtggagatcctcagtctctttctgtaagtgaacattttgtgcttcactcccaattttttggaggctggaaatagattcttttccagttgttctgtcaaaaatagatgtagctttattttgaatttgaagttcccaattgttcattttgactattactgattattgctaagagtggcattatgctattatgctcctaaaagaaaggtgaattttgacctacatatagtataatgtatcaatattggtttaattgtttgttcttttgttccttttggtgctcatcttgcgccttgttctcatcgctcgttttttcatgttgcacttgatttaaatttgctcagcttaacttgtctttttgaatttatattacttattgctatattttactaatttcgttgaaactaattttttgctgaacttttcgttttgttgaaatcatttttctgaattaacttgattttcctgaatagaattgaattttggtgatcttaccttttctgcagccttttatttctttcttgtcctttttccaatctcatttttttatatttccattgtgttgacatcttatcattaactgtgcagatgcgtcatgcatttccagaagtatggaatattgagaacaagtatggaccataagacgtttattttaatcgacatgtatgtttcttagtttatacatatattaattctgtggtaaaaaaaccgaacaagaatatctttttttttttctatcatcaaaaagggtgaatatatgtagaggaaaaagatttgaatcaagatattagcctaaagcaataataatgttagtaatagctttaataacaaattcaaaacgtacattaatgaaccgagaggccggaaaatagttaaagtgaccactaagagaagcgaaggattcatgatgggttttcaacccagtagggcaaatttgttcaatgttctttacaaatcaagcttattaccttgtgggtgtttttgctagagatgaatgatagaattttccctagttggaagtcttttttggttactttatgggagctagtgatgtaatttgtttcgccttatggcatttcctaacatgtgcttttgtgatgtattgaagctttttttttgccttaatttatgctggattttaattttgttctttgtttcatttttcttgcttttgaaaaaaatatatagatatgtatatattaggattggtcgaggattttgagggaagggaaagacctaagaaaacttggatgagggtgattgatagtgatatgagtctatttgggatcgaagaaaatattcctttggataaggtgtagtggagggttgagggagcaaatttatgcagattagcttgacttaaagtttttctttttgattatttttcatttacttgtgttttgcaaacatttactcatgaatgatgtaaacttcttcaaccaaatctctggaaaaaaataatctacatggaaaaaacattattaatgttaacttgacagagatcccatccttgtgaagcagctagcaattaggcatctaacaattgacattttaatggacaggatagaatgtctcttgatagtcaataccctctgtttcattgtatcccatagctactaatctagtttgtatctttccaaagaaccattattttgaagtttcaccttgaacacccattttgaaccaatatgtttcttgcccttggggagaggggctaattgccatgttttgatgcggatgcaaagacacttgttctacctgagcctattgacttgatcatggatactctagggtttgaactcaagggaaagaatcaagtcttggcatgtgtggtgacatggcgtggggatggagtaaagaagagtcatagttctgttaggatatgttcttgcttgctacatagaatcgtagttctgttaggattgctatgatattatatctagtagatagattttatagttaattaggataaacatgtgatgatcatgttataataggcatgtgattagaggataggattagcttaattcttatcttgttgttagtttaattcttatcctagttttatgtttatcttagtcgaagttgtagccatataaagggcgttccattcattaataatacttagttttgctttgtgttttaaacatacttcttgattattgtttgcttgtgagctaactaatcaaaccattaaagacttttcaggagttttagtgctaaacatcttaatttcaggagtgattttaagagcgtttagtgatcttgaatcaagaaatatccttgttcttgttcgactaatatcagtggttttgttcgagttcttggagttaatctcttcaagattcttattcaacttgattgttgagcttattggtttagtaatcatatcaagtggtatcagttttccagggaggagaggatagataggattctctttgatcaacaaagatccaagggctatcaacaaggttcaaacattgctgcttgttcaagacttgatctttttctaccaagatgcattctttacgtcacaaggtagtaataacaagattaagagtggtttttacatccaagaatcaatctttcacgtccaagatttcatctttcacgtctaagattcattctttaagatcaagaaagttataacaagcatagaagaacacataaccatggagtccgagatggacaagcttgccaaagctatgcaagcacttgcaaagtcgcaaactgaatcacagagtcgactcaatgagaatactaccacaatcaatgggattggtagtaacatgaataggttggaggcacgcatggatgccattgcaaccatcatacaaaagaagcttgatcggaatagtgccaacttcataggtgccaattcagaggaagagttggcagaacgtgaagaaagatcatccaagactacatacaatgatgatcgtggcttaaagttggatgactataatggagatagcaatcgagaagacttgttacagtggattcgacaacttgagaaggtatgtgattatagaggctttgatgacaagaaaagattcaggattgcctccataagactcacgaaatatgctggaatttggcttgaaagcttcaaggcacaacgagccaagaaaggtaaagaaaagttgtgtagttggacaaagttgaaagttcaagcttaaagagaagttcttgcctagtgactatgaacaaaaatagttcataagactctctactataagccaagacacgcttagtgtacatgagtacaccatggaatttgacaagctagggcttatatttgacatagaggagaaagaacaatggaagattgcaagatacatcaaaggcttgaaccgccacattgccaagaaggtggaagtatccacttatcacacctttgaggatgtgacaaagttggctaagaagtttgaagaacatgagaaggaagagaagcctaagagttcttacacgcctaagtatgatactaatgctaaggccaaggctagcttcctactcaaagtggtatgaaggacctaagaggctaagaacctcaccccacctaaagaagacacaagagttgagaagcctaaagtcgtcgttccaaaggagaaatttgaagagatgagaaagtgcttcaagtgtcaaggaaggagacacatagcaagcaattgtcctaacaaaagagtcctcaccatgagacaatacctagctttgcaagaagaggaggatgtctattagttcgtccctgatgaagagcaaacttaggggaagaagaggaggaggatgcttttgctgaggatgatgcaaggctagtaggggtcaagaggcgcaccttacatgtcgaccatacacctagcatggagcaaatggaaaaatcttttccacactagatgcaaggtaggtgactatatatgtaatggtataatagatagtggttcttgcactaatgttattgtatctgaggtagtgtcaaagctaaacttagctacaagggcacaccctaagccatacaagttgagtttgctagatgatagcactggcatgagagtaaagaaacaagctttgatttcattctctataggggttataaggatgagttatggggtgatgtattgcctatgagtgcatgtcatctcttgcttggaagaccattgcagtttgataaaaaggtcatccatgagggggactctaatgtgtactctgtgttggttggttctaagagggtatgtttgcatcccttagctcctcattcagtggcgccaaagcaaccacctaagacaccaagttactttctatcttcaagggagttcgaacaagaggtggaggaagaaggttgtgcttatgccttgattgtaagacatgctgccacaagtgtcaagactactagcaatgagaagctcgaagccttgatgaaagagtttgaggatgtctttctagaggaactacgacccttgagaggcatagaacatgctgtagaccttgtacctggcgcccctttgcctaacaagcctgcttataagtgtgatccagtggcatctagggaattgcaacgccaaattgaggacctaattgaaaagggctatttaagggagatcatgagtccatgtgttgtgccagctttactagttcctaagaaagatgacacatggaggatgtgcatagatagtagagcagtgaacaacattacagtcaagtaaaggtttcctatgcctagattggaagatatgttggataagttacatggggcatcaatcttttctaagattgatcttcgaagtggctaccaccaaatgaggatcagagaaggtgatgagtggaaaacaacattcaagaccaagcagggattgtatgagtggatggtgatgccatttgccttatgcaatgcgccaagctctttcatgagcttgatgaatgaggtacttcgtccgttccttaacaagtttgtggttgtttacatagatgatatacatatctatagccaaaatgtggaggaacacttgttgaacttgcgtagcttattcatgaagcttagagagcaccaactctatggtaagattgatggcgacgaggttgacgggggattatggcggcagtgaatcaccctctttgccggtcactgaaatacaacctgaggtatctttaaattctgtaattggattgactaacccaaaaactatgaaattgctgggaaaaattgctggatgtgaagttgtggtgatgattgaccctggggcaacccataattttttatcactagctactgttgagaaattagctattcctgtgtcggaatcggaaggatttggggtttctctaggggatggacaggcggtgaggggtagtggaatttgtagaggggtgttattgagtttaaatggtggagttgaagtggaaacagattttcagcctctgggtcttggtaattcggacgtgattttgggtgtacagtggctggagacgttggggacagtggagagcaattggaaaacacaaacaatggggtttgaaatcgagggtgtcaagttcactttgaaggtgacccatcactggcgaggtctcgaatctcactcaaagccatgatacgtaccttatgtaaagagggtggaggtttgtggcttgagttgaaccagattgagcattatcaggagaaaacaccgcattcatcagccttacctgaaattccagttttcttacagagagtccttacccaatttcagtctgtgtttgctacaccagaaggcttaccaccgataagagaacatgaacatgcaatagttcttagagaagggtgtaatccggtaggggtaataccgtaccgttatccacagttccaaaaagatgagatagagcgcctcatcaaagaaatgttggcttccggaatcatcaatccttccacgagccctttctcgagcccggtgatattagtgaagaagaaagatgggtcgtggcggttttgtgtagactatcgggccctcaataaagaaacggtccccgataagtatcccattcccgtgattgatgaattgttggatgagcttcatggggcaacacttttttcaaaactcgacttaagggccgggtatcaccagatccgggttaaggccgaagacactctcaaaacagcttttcgcactcatgaggggcattacgagtttttagtaatgccatttgggttgacaaacgcgccggcaacgtttcaatcccttatgaacgaggtcttcaaaccattcttgcgcaagtttgtcttggtatttttcgacgatatattggtctacagtagttctgccaggaacatgaggagcatttgaccttggtgttgcacaccctagcagctcataaattgtttgtgaatcagaagaaatgtgattttggcaggtcggaagtagcatatatggggcatatcatctctggtcaaggggtggctgtggatatggagaaggttcaagcgatggtggaatggccccttcctaaaaacctccgggaattacggggatttttgggccttacagggtactaccgcaaattcgtacttcactatgctcatatagccaagcctttaactgatcaactcaagagagatgcgtttgggtggtctgaggcagcaactcaagcctttgaaaagctcaagaaggcgatgatcacatcccctgttttggcaatgccggacttccaagagttgtttgtggttgagaccgacgcatccgggtatggtctgggggcagtgttaatgcaaaacaaccgacccattgccttttacagtaagttgttaggtgcccgggctcaattaaagtcgatctacgaaatggagttgatggccatctgcatggcagttcagaattggagatattatctgctgggtcgacatttcctcattcgtacagaccaacagagtttacgtcatctcactcagcagcgagaagtaagtactgccttccaacgttggatgagtaaacttatggggttcgattttgaaatacagtttaagccggggtgtgccaaccgggtagctgatgcattatcccgcaagacagtgggagaggttgaattgggtgcgctgatattaactcatggggtggactggaccgacttggagcgtgaaattgaaggcgatcctctgttgtgcaaaattaaacaagacttccacgggggtgctattactcctgtgcacttttctttggtggacaacaagctgttgttcaagggtcgatacgtgattcccagctcttcggtttttattcctaccttgctgcgagaatatcacgattctcccattggagggcattcgggggacctcaaaacatatctcaggatggctgccgactggtattggaggggcatgcgcaaggatgtggcgcggtatgtgcaacattgtagcgtgtgtcaacaacaaaaaatgtctcaacagatgccagggggggtactacaaccactccccataccttcctcggtttgggatgacttgtcaatggacttcgtggaaggcttgccatcttccaagggggtaaacaccatcctcgtggtggtcgatcgtttgtctaagtacgcccacttcctcccactacgtcatccatttactgctgtgtcggtggcaaatgtgtttgtcaaagaggtggttcgtttgcatgggtttccttcctccattgtttcagatcgggatcgaatttttatgagtgtgttttggcgggaattatttcgtttacatgacaccacactcaaacgaagtaccgcgtatcatcctcaaacggatggtcagtccgaaatcgtcaatcgagctctggagacttatttgcgttgctttgtgggggaatacccgcgctcttgggctcagtggcttgggccgaattttcatataatacttctcctcatctctctaccaaaatgaccccgtcaaggtcctttatggtagagaccctcctactgtgatacgggttaatcggggagcctcacctgttgaaagcttggaaaacatgctccaagagcgagacgcagtattagatgccttgcagattaatctgattaaagctcaacagaaaatgaagagtagtgctgatgctacaagaagagaggtgcattttaaggtgggagatcgagtgtacttaaaattacagccttaccgtcagaaatctttggcttaacgcccttatgagaagttagccgcccgtttctacggaccatttactattttacagaagattgggcaagctgcatacaagttacaacttcctgtttctagcaaggtgcatccggtgtttcatgtctcccaactgaaacaggccgttggttccattcccgtttcagccactattccagagcaattgtcttctgacttggagttagaggtggaacctgatgaactcctcgatgttcgtagtgtttctagaggccagcacacttacttggaagctctcattcagtggcagggattaccatcattcgaagctacctgggaagatgtggctgctttccatcaccattttccatccttccaccttgaggacaaggtgaaactttgggggggtggtaatgtgatgcaccaaactaccactccactactcacctattagaggcgtaagaaaaagggggtaaatcaggaatagtttacaaattctgttgaaaggaatattttgtaattatgatgtcagaggttgttagcaaaaaggcagtagagtaacaataaaaaggggaagggaggagagaagaaggtattgagatttttgtaaggaacttggcccttgggagagttgggagcctctcgaaagctcaccattatcttgtgaatattttccttcctggttatatacaagaaccttcctctgtcaatttcttttctctctaatcttatttcttattctgttttctggttgccattgtttgaagttgcttgttgtgcttgagtaaatacgtgaagtggtgaaacccatctgaattcatcacatctattccaagtggtataatacaagcttgtaatccaaatctaatgagaaatctaagttatgaagaatttcaaaagaactaagtacccttgttttggatgcccaaggatttacttgccgctcaagttaatgctcaacgtgcaagatacaacctctttagtatcccaaggtagtttccataagaattaattgagctcaaatcaagaacaatatttttatgtattaatgtgaacacttcctgaattatattagatatatggtctgaaggttggaagaaagattagcttttaattttaagtttgagatagtttttagaatcgaggaaagattagctcttaacttgtaaactaaggattgctttataagtaaaacattagttatggaactcttaaaattggttttgaacatttctagttaaaaatcccatgtaattctcccaaactagcttaaaatctcacatttcacaagctaaggagagacaaatggcgttctcttgtgaaacaatctaaaattttcattaggctactgttttcaagtatttatatgttagaagtgccgcatataggtacataaaataagtttacaaacacaagtaggaataaggaaaactaaaagagaaacttcagccatacaaaaccggctgaaatcagctactactttctactttctagcttcaaaatctgattgcaagtctcctttaagccaatcaccaatgaaaacctttcctccacatgaagtgtgctcaaatcaagagaagaaacccatcattcgcctatagctacctgggtcagatgaagatacggcaaaaaaaacgctggaaatcagtgaaccaaaataagcaccaattggatgctttctgtccttgctacattttcttctcataggactacttcaagccatacatgaataagcagttagatccagctcctagcatccatttgatcgtacaaatgagctccaaaaagataagtaaaaccaagcagccaaaacctaattaatactaatgatgaattagttgaatagctaatgacgatgaagcaacactttagtaggaatagtgttaattatgatcaatgctacttaatcttctgattaatttttggaaaaatgtcatatctaccttctgtatacacttattcataactatatcgtattattattatttttaaataactaccttttaagtaccaaaacctaagaaatcaggcacttgatggattccatccaaagatccatttggcggggcccactaactgacttttgattttttgcctttcctcttttggttaatctcaatggttcatcaataacaactcaatcttctccccatttcatcaaatcatccctaaatcagaactttttcaaattcacccaaatgaggttatggaaacctctaccaagtttattcgaccacttttagtctagctcaaagttttacacttgcttcaaaaactaagatttattaactttagaaattaggtttttatttttattttttatttaactttgtaacaatcttaaataactcaggtgctttctagagtttggctttaattgtttttcccttggttatgtgaaagaagtatgactactttctccaagactaaagtagagagcaaaaaatgcaattctggaatttcttgcaaaagaaaaggaacgagttaatgataatgaaaaacaaagaaaatgatgagaagagaggagctgaatcaatcatgatcatgtattttaaagttttttttgctattgaagtgacttaagaagaggaaagaggatgagtgaagacaaacaaaagaaaggataaatagagggaaatcttgggcttagaaaggtgaaaaggtaagaagatgagttagtgggccccaacaaatgtatctttggatataatccgtcatgccactgtttggggcttgcttaagtccatacattacttcactaattttacaaaatttattttcttgaccaagaactgaaaaaaccttcagtggtgatctattaggttttggaagttaaaaggtagttatttaaatgtttttaatataaaaggtagttatttagatatttttaatataaaaggtagttatgtgaataaaagtgtatataaaatgtaattttttgacatttttgccttagtttttcttgctaattcaccttttcaacttgaccaagttgctatgaggagaaaacgagcaattattaagcaaatcgcaacactagcattaatccatggcccatgaaactctccataattagagattggattagcacttagtagaacttcttgctcctgctccaggtttccattacttctttatctaagtgcatcaaaaggttgttgggttatgaaaggtggtggttgtgtatagtcattgtcaaaatgttgttaatgcactctatttagaggatgagggattgaatagttttcacctcgtgacctttcattcctttttaaaaaaattgataatgtgtattggtcctatgactgtatgaatggtaataagctatctcatgagctgttactatcttcctcagagtctaggtagaagggtttgggctgataattttctactatgtgcaattagtttgttggatttggatatgctagttgatataggtcctttcccttgggccttctcttaatataggcctacagtgtgattgaagataaatcttctggagaatataagaacaatgagatggattggttagaggttgatttgttcttttggtgtaagactatttcgggttctctattggttatgttcagacgccagaatatgtgttggtgattgttttccatgaacatactttatccgcagagacatttttcttttttcttcctataagattatatttgtttcctctcttggtgctcatctcagtgtctctactttacgttaaactgttgacattacttgacaatgcgtatatttgtcgcatggtgctcttccctcactccacgtcgaccccatacatcaaaaaatgccattaaagaatattcgaactcacaaccttgtgttgaaagaatggaatccctaccaatgactcattaattcattttctctttaagaaataaatgatttcctcacaaacttttaggctttaagagcccaaaagataaaaacataaaataagatagacatcaacgtcaagattagccttaaatgcacaaagcacatgtcaaatgattgataactactcacgagttgcaactctttgggcgttgcctaatattaattggatctcttttaaaaattgttggtggttatggttggtggagaggaccatgtaacttttagctggtcacaactggtaatgattgtcacttttactgcccataaaaaaatttaaactgttgaatatgtttctggcagtggatctgacaaatcctttacaagttggcgtccattttgttttgccatgtgactcaattataatacgtgagttttattatccaccaggtttggctcactaatttccggattaattcaatctaaactgtctccaaagaaggaaaagggtggaggaggaaagccttcttctaatgaaaagacacgcatacgtggttcgttttctttccagggtggaatgcaggtattagcatgtagctttcattctgttaacatttgtggttcttccagacatacatccaatgctttttttttttcttgctataaccataaacattcttgtcatgaacattctttaatactgttgctgagcttagtgtattcgttcattcatgtaatttcctctcttgaggttaaaatggcatacagccttacaacctatatccataatgctccttagagtagaatccctaggttataacatagtaccacttatcaaaataaacatggcacacactgcaggacaagaagtaaatccacctagagaactgagcacctagtagtaaaagcagcgatacattactaataacagtagcagggccataagagtagtaaatgggcctcatttcaacactccccccgtaatggtgagagagaagaagcagtctgaactcccagcttggagagcaaaatagagtgttgctgaacagggagaaccttagtgaaaacatctggcacttgatcttgagatggaacataggtaggctgaataaccccttcttcatttgtattgtccctcaggaaatgacaatctatgtctacatgcttggttttctcatgatgaactagatatgctgctatggcaagagcagcttggttatcacagtagataggagtagcactggactttttaatgcgaagatctttgaggagttgtttgatccacatcacctcacacacagcaagagccatggatctgtactctgcactgaccacaagaaattgcctctttgactttcaagatacggggggagtcaccaaggagcacacaaaaccagatgtagaatttacaacacccatcccattcactatcacaaaatgctgttagttgagcactagacttgttcgccatgagaattcaccctgttggcagcttgaagatgcacattagtggggcagtgcataaatttgcttaaatcatgtatagtgaaggcaatatcaggcattgccttgtaatagtgagataaatgagcttccccatcaatttttgatacacatcaggttgttgaagaggatcaccattgtcagcatagagcttgacatgtgagtccatacgaagcctcaatcgtctgcaatttataaaaccatattcatcaacaagacccatcacatacttctttagagataaaaacgatacttcactacactgatccacttcaatcctcaaaaaatatcttaggccacccatatctttcatgtgaaattggccagcgaagaaactctttgcttcctcaatagttgctaaactattgccagcaagaatgaggtcgtccacatacaccaatatagcactgaaacagtgagagttttgcttgaagaatagagagtagtcacacttggattaagtgaatacattttgctttaaagcagtgttagcttggcaaaccattgcctcaaagcctacttcaagccataaagtgacttaagcagcttgcacaccttagttcatttggtgtcacttctgccatcagtacttagctccccctctccttgaactttgatcctgttacatgtttcactatatcctggtgatagcttcatgtatacactatcctacaattcaccatgcaaaaaagcatttttaacatccatttgtttgcaagaaccaaccctctaaggatgcaacaacaagcatgtggtcatctttgctacaggggtaaaagtctgctcataatctattccatatctctgtctgtcacccatgattacaagccttggcttatgcctattatttgtgccatcagtgctgtattttgttctgatccatccatgtgagggatggctcatttctacaaaatcctagttccgttaggatttgtgttgttttcctaattctagtaggaataggactcctaaaatcctaatcctcctagttctgttaggagtttaaaagttttagtttgattgtaattctagttgtgttagaaatccaaatcctagattcatgtcacgtatggttagaacatggctagtaggataatttgtcttgtgatgtccatagccttggcatttgtggcacctaactttcaatagcttgtcttctgtctccttttctttctccttctttgaggaatcaacgtttttagagctatctaaaccactagcatcaatattaggtttaaaagtgctaaaagatttcgaatagttcttacttgcatacaatttctttttctagtttatgtagcgtcaccagggaacaaaaactcggccgttccgttctggaacggccgctttgtaacggatttcagagaggccgttccgttaaataccgttctagaacggtgatttggaattcacaccaaactcggcgcgatagcgttacgtaacggtgtaacggcgttccagaaccgttacaatcacataacgtccgttatttgaagaagaccagttcttttggtggaggaagaagaagagccaacgcaagatctatagatctgagttaaaatttgaaaataaaacatgtttttttatttaaattaaagcttacagaggatgtagaactcaaattcgagtaaacccctcctttaatttcattaggttactgcaaatcgaaccctaaattgcaaaccctaatttcgaaaaaaccctaatatgcattgggatgcaacgctgcttctccggtcatggcagagaaggtcgacgagtcatcttcggctgcttttagcactgtagctgccggtggttggcttgtttgcaggttagtgcttgctggttttctttctctcataccgatcatcttcttcttttctctcttctctttttcttttttattgtgtgactgccagtcacgtgataattgcaactcataaagtatctctttctctctcttcttttcatccctttttatttttctttcccttttagtttttattccctcacgtggaatcacctaattttcatccttttttatttttttagttacactcttacacagaagtatgttcaaatatcattatagtacctcaaatattgtatttataagagttttggacataatatgatatagaaagtaaaatagaagaaaaataaagtttaaatgtcacttgtgtgatttttttaaaaaaattcacgccgcgacggccgcgaaacgttctatttcccgttacaagccgttcccgcgataacgcgaccgttcccgcgaacgcgaccgcgaccgcgttttttttccttgagcgtcacatcttgcaagcttcttcaaaggtgagttatgtgtacaactccaatttctctccaatcccctccgtcctcatttaggcctccaaggaagctacttaaacattgatcttcaagttcatcaattttccaaagaatggataacttctcgaactcctttatgtaatcttcaacggacatattcccttgtttaagagtagaccattccatgtacaagctttgtttgtagttagaaggaacaaaacgtcctcttaacaactttttaagcttatcccaagtagagattttgggtttattagctttcacacgctgcctctttactccatccaaccaaatagatgcatatttggttaccttaagcacggccaccttgtatttcttttcttttggtgtctcttaatcccaagtagagcttttgcgtgtgaaagctaataaacacaaaatctctacttgggataatcttcttcttgtttccgaaacaactaattcttatggtagttaggaaagcaagaatggtttctaattcaatagggaatatattaattattattagtttaagttaaatagtgcacgaatctaaatagattattcgtctcaaaatctcacttaagtatagatttgtttggacatctgagggaagaagaagagagcgagataaaggagaattatcactcaatgaatccatatcccgagttttcccatttacttctttgaaagcaatatagttcacgaggtcttattatcagtctatggacataagagtaataatttaagggcaaaaactatgactttatgggtttaaactgatacatgttctgttaaactgatagatgttctgtgttaaaccgatactcatatattcctggttaaactgatagatatatgatttaaattgatacccgtctcagtcatgtcttggattgagacggtctgacacaagactttttgtgtattatatatctgattagaataaatttatcctgtttactaattattttatcttctccagacacttgttgacacaatatgcaatcagtttggtaaagatgaactcaaactacagtgcaaggtcctttcattgtcctacagtcataaggggatcccttcttcagaaaattgggtcgtgtcttctgtgtcaaaaaattccattgaagatcaacaatatgatgctgtcatcgttaccgtgagttttactttgcttactgctattgcaccaatctttcttcttttgacacactgataatggcaatgctgttgtggtttgaagccatgttatggggttttagggatatttatggagtctgatctaatatgttattggataaaattcagatctgtaacgtgactcaatgagattgaaaaaaattgaatcaagataatggattggaaaattaggagctaacctagggtctataagcgatccacttggagtctcataccaagcaggtattcgacattttaggtttatattgctgctatggctcatatgggagcctacatagggtctggtgcttattcctttttcttttgtctagttttggggctgcacatttctgttgtgttttgatatggatagccatcacctgcaattgcatggaggctgaactaagttctataggggagcaaacagtatctgttggaaatttattttcatattgtgtttttaaatgctataatccaaaatttgttgttcccctaaaatgcctaaaatacccttatgtaactgctccatctgtcccttaatagacttcccatttctccaatgcatgtttgccaatacacattttgtattgttaatatcaaaaattacatattagtaaaaattataaaagtttgattttcctaatgtacgcaatgagacgaatcaaacaagacgccatatgactatgttttttcttatacttcctatgttttttaataagtgacatgttttccttttagggaaatgtcacaataagtgacacatagctcaaagtagtaaaaatacttctcatttattacatctttgccattatttaattgtttcacctacctactttatccaatactcaaatttgattggttgaacaattggtcccaactttctctagactccttggtattccctttcccccactttctctctgtgtcacttattaaaaaatggaggacgtatattggaaaaaaattggaaggttttcttcacttatgaatagtggtaaaattagagatgggaaggctattttgggatggatggagtaatatttaaatttttaaaataatgtcattgttttagtgatgaaataaaattcaaggctattttttctagtaattatgttatctgtacatcaccacacgtatcgcgtgcatataagactagtttgatgatattccaacactgttcgaaggaagtcaggcatggaaccatgtttgcttccatatgggaaatattttgcttactctccttcaaacatctacctcattatcccagaatgattgatcgaatctaatacaaatatacaattgatcatatgccaccagggaattacatcaaattaaatttttatagaaggggaatcagtcatagcctcatagggaacgaataagtgatactcgccagtttctttcctggttacttttcctcttctcactagccatcctttatgtatgggtatgctgcatcattcctgccactggttgggactcccgtttgaactatggggggatgggaaagctaagccatcatcttcaaattgagtttcttgagaatgtaagacaccatctgtaagatgaatatagtgcactctatagtcaatgtcatgatctttatgggtttatctgctgaaataactgtgatatacccagctctccatttacaaagttttcctacatattaaactcttgcccgcaattctagaacttcattgtagaacttttcctacataagcatcatttgtcttttctgtagtaaaagttagaaagagctttattttagaacattcgtttttagttttctttgttgttgattactccgccacttttaatacttttatgattcaagtatttgacaaaatcatgtaatttaggtcctctgctgcatgcagtctataccctctctctctctctctctctctctctctctgtggttgtgtcttacttgttgagttactaactccagccattacataaagtaggctggcattatgatgagcaaattactcaagaccacatgttagctcctttttcttttctccttattctgaaaggcaaatataggtccatcttggtgcttctcatgtcataagtaagctgaccccctccttttccagggaataggacaataatccaaaagtgagggttttacatgttgggatttgtgaagtttcttattttacttaatagccgagtcagtgttacaatacatagtaccgtgttacaaaatagtatgtaacaccaagcatgtttatgtgcaaaattgtgcaagactttgttgctggcacgccaagggctgttttaatgtagtttacttattcttttaggtttttcagatgacaatcataaagggaattaggagtgtttttattgtagtcaatccctattgtgctacaacgataaaagaaaaaagcacaagactagaaggagaagtaatgtctaggaaagactcctcacctggggttgctagtcacctacacatcttagaaggcatcaaaccaaagcttattcccctcgactgttttcgggagaaaagaagacaaaattgtttctaacttatactttaccagtttcactacagcatcagaaagaagcaaaatatgctcccacaacacggcgaacctagctttccagatgtgataaaccagaccagcaaaatgattattttcactagagctttgagtctattttttcggtttttccccttcttcctggtaatgtcacgccaccaagccatcatctcaattttttgagatttgacgtaatcgctcaaatagctgagtaagacacttcttgctctaaatactaataaaaaagaggtgaatgtgggtctcagccatgttactcaaatcggataaagtgtctactcttattagggtttttgggtgttggactcatccatttttttttgtaaaatgtcaagattttggtttgaaatgagagattcaagtgtcgtgacatgagtcggcacgcaacacttaaacgtgtcgaagtaacagagggtctcagacaatcaactttaatcaatcacgaaccccaaaatttatgcaacctttgctcatattcagtctctgtaaagcactcaactgcagcacacccacccattcgcttcacctacagcaggagggcacccaagtaattgctatgatgagcgaattattctgttttgccttgctggaatattgctgttagatttgctgactcactggcagttaattatagtcagagaatgagaaatatcctgtagagagagaaagggtatcttttgtatttagctctataaatagctaaggaagggaagggcattgagagtttatgatattataataggagagatttagcctctcgaatgctgataggagcgtagctcttgttggattatcaatactactctgtttgctctatctatttctactcaggttccttcttgtacagtggatccctgattggatttacttcatcaaccagcagataaaattatttgtaggcacattgaaaccattccaaacctaatgaggccaaagtttatcacaaagaatataggagccaaatgtaggcaacagataagagtataattgccagaagttgaagactccaggtattgttcagaaaccttaatgcatatcatcattctgacactagattttccccggagccaactaacaaaaatgaattaaagagattaaggctatgtttagttcacctgaaattttctgatctgaacttatctgatctgatctgaacttattttttctgatctgatctgatctgatctgaaccaatctgattacaagatcttatcttttagatttttctcaatatataagaaaaaatatagtcatgtggggtcttgtttgattcgtctcaatgagtactttattaatattcaattattataatttttactaatatgtaatgaaagatataatgatttttaaatataagcatgatctgaactgatctgatgtgaacttattttttctgatctgatctgatctgattagatctgaaataagcaaaaataaggtgaactgaacatagcctaagcaacaattgagggaaaataagatcattatggctaagataagataaatatgtaatgataaaatcagagtaattatatcagttacactctcaacattcgtcagattgaggtttcctcccaaaatgccaacccacttttctgtattttcacgtccttctctctacccttctaggtatatattacatcagctgtaaaatttttgaaccaactagtagaatactgatctaccctcaactgcctcactttctcattttttctgggcctttttctctctagcacaagtccacataagtgatgcatagcagaaatataattccactagtcatcctcaatattgatataacaaacacatcacccacatattatcatttttaatcgctgcatgcgaggcatacttacccaccaatcaggatatgcataacagcgttcctaattccaaaaccaccatatatcttgggtttgcaactctcatccctagcaacaaggggactttctgaaaaagtggcagattccgcccacaagtagtttgtacggacacctttattatattattaatatcatatttcggcaacacaaattaccagcccagtaaaacatgaattgacatgagactaacaaggggcccaatctaatatcgtacgtctgtactaagcaatgtataaaaaaaagctcaaggtgcattgatgcaatagggatcctaatgtgcataggtgcgcctcattgaagtgaggcaccactaaggataaataaaaaagattgatgtaaaattaaattgtgcaccttgggtgcgcctcgatgaactttttttgtgtgcctaagtgtacctcaagtacgcctcattgatatcgcctcgcctggcagaaaacgagcttgaccccaatcgccttgctccccaccgcctaggcgtgcctcagtcacactttttaaatacattggtattaagtactcagaatggcaaaaagaaactttgggcattaattagacatttcactttttgtgcaactatttgtgacttcagagattgatatgttttctacattacagacttttgtgatggctgcatggtctccactgtcaaagaacattagtttaagtagaagaaatattgctctattaccttcctccctctacaaacaaaatcctaaaatgtggttatgtagtgccaattcaaacttgtagatgcatgactaatgctttcattatgctgtgggtttttatactatgattcatgtccaattacataacaattagctggagtcaggatatgtcacggaaattttaagcctggcaggatgattgtttatattttctctttttcggtgtttaagtcaaagtaaacttctaggctgctcttttataggctagttgggctgttggggagatctacacattaagtgtgaagaaatcttgtctaactccagtttggttgagaactgtaagctgtcataacatttgttgcatgatgaggccttgtgggattatcatgttagctgtaaactctaaacttacttgaaatctagtgttgtgtctccttatttctgtagtcaaaattgaaccttctgtacgtttttgatacctgcgactagaatgatggaattctgaattactgatactattacaaccatctgctaagaacgaagatgactcttagctaatttctcagcagatttagagaaattaagaagaattactaatgaatatttaaagagaaaactaccaagatatgattgtattgatgaaaaacaccaattacaacctaaccaacattcgagaggttggagctctcccaagtaaccatttctctcactaaacttatcaattttcaagatgccttttccattctcagttcctctatatttatactactccccttagcaaactacccaacttattccccaagtaaactaaagagataatatctaaaatacccttccccctacaataatattagttcttagcattaccggccccctaaacttccaccttgtcctcaaggtgggtcgtaatcatcactaaattctgggcctctactcgtatattcagtgtcttgcagcccttcaggccccaagcctaggttatgcagctcgtgttgcggctcctcctcatatagttctctggctggagtgagtgcctcaactataatgaaaaagtcctggaggtggggaaggaaggagtgtctgaaatggtgtggtgtgctgctggtgttatgggcttgtgcctgaaagttttgggtttaaagagatggagtggagaagagtggagaagtgactggagacgtaaaagaaggaatcataatttttgtaagtggtgggttgaaaaagttggtgggaagaattgtttttataaaatgtagtgtaatggtcgaaaaatgggtggagtaagtatggtttttggctggggatgtggtactgggttgaaaataaataggtctgagcttacttgtaaaattggcctcaacatgagcaggcccaatatcttgagccaattccccaaaagctggcaatagagcactcttaattgcattgttgtgggccatcgggctccaaacatatattcggaggagccggacttctttggtgatgtcattagcttggcccattgcacactttcccttaacagcctcaagatcttttcccacttttgtaccccaaccacgtggcttcaccatcctttctttcttgcttttgtcacttttttggcaatatacgagtttgtccttactaccctcatcttctaatgttggcttcctcaccaagcttaatttctggaattttgtccaccaaatcccaccacccatcgtcaacaccatacctatctacaccggccaagaagcctggtcctccacccgaattttcgccacagacaaagcctgaacaaccgtcagttctctcaccggagaagttcacaggtccaccacctgacccactagttgctgatccacccttcacaaatctccctcctctggctgccacaagtagtggttcctccgtaatactcatatttctcgtccaagagccctggaccaccaccggacccacttccaccggcaccaacttgttcaaatgatacttctctttcttttccaaacagcctacttggactggaaaaaccactgcgattgtagcctccgccagatctgtagcctagtgcacctaacgtgcttccaactgcaacccaatagggatggaaatggatgggattcggggagggtggagcatcacccgcatccgtcacccgcatccattcgctccacccgctccacccgcatccatccatccgtcacccacgggtgaaacgggtgggtcggtgataaacgggtggaaccatttagggggtgtttggtatcatgtttttttacaaaagaaacagaatcaagtaacaaaatccgtttctacttgtttggttctatgttgctcagactcgagtacccatgtccgacacgggtacgtgtccaagtgtccaactcagctattttctagaattttttatattttttaacccaaaacaaagtgtccaagtgtcccacccatgtccgactcccgaggatccgacacgggtacttgaggtgaaatgaagagtccgagcaacggaggtttggttagtgtgtaaagtaacaattaccgttacttgaggaaaacacatccccccaagttgtttccattcaaaaacctaaggaaacaaataacgtttcactcctcaaacaagaggaaagggaatgggttatatttatttccattccattaggataccaaacaactaataagggtaacacttattattatcctttcccctccttatcaaaatcctttccattccgtttacggtattcataccaaacacccccttagtatattttctaatgaaatttgtgatatgatatgcatgatataaaataattctatcaaaaatataaaaagtaagtaaacttacatgtacaacttaatagatgggtgatgggttggaggttaaacgagtgatggatcgggtgacgggtgaagaaattctcacccaccactcgctttccatccatttaaattaggtttttcatccatttaaaaaaccgggttaaacaggtgatgtatgatccatcacccatttccatcctcaaacacatcccgatttgtttactgcaccaccagatccaccagtataaccacccgaaaaatcatcatgccttctactagccttgtaacctgctcccggtgagaagcttcttccacaagtggtggtcgctggacctccatctccttcttccccaaaaaattttccatgacacccactcgacccttcatctgtgacaacctcttcttcgtccacctctgaagttttggggtcgtcttcctcctcaagctcctcttgaagtaactttaacttccgttggatgggagagaacgcttcattgattatcttcaccagatcttcttgaagtttctcgaaactttttctcacgttttcctctacctctttcgtgatttcctttccgatctccttcatttttagactaggagctcttgcgattccatggcagatttctttttttaaaacaagaaaatcaggcacttaatctcccagaatagtggtgctctgataccattttctaagaaccaagatgactcttagctaatttctcagcataacaacaaatttagagaaattaagaagaattactaatgaatatttaaagagaaaactactaagatatgattgtattgatgaaaaacaccgattacaacctaaccaagaggttggagctctcccaagtaaccatttctctcactaaacttatcaattttcaagatgccgtttactactccccttagcaaactacccaacttattccccaataaactaaagagataatatctaaaatacccttccccctacaatattagttcttagcaccatcaaactgggatggatggttttgtaaggttccaatttacttctccatcaaaatattttaggattttttatctcatgtattttagagtttcctcgtccctttttatctgataagattcttctgatgatttgattttatggtaggctccaatcagcaatattaaagaactgaagattctgaaagctggagttccattttcacttgacttcattccagaggtttgtatttttatagtggttagacatgcttcccctagttttcaaagtaaaagcatccttgttgtgacgatattttttcccttgtttttgtttttattattatcatcacttatttccattttctattttccatgctgataagatgttcatcaccataatcttgtggtatcagaagtgtttagtggagtttattcactacacatgcagttgttcttttgccatgaccgccattcattttctcgtcaaaacaaatctatgaagtttggttttcagactcatggttcttgtagctcttgtgaatttttttttcttctccttgcatgcattcttcaaattacatattgcatataccaggtgctctcctttattttatatttaatttttaaaattctatcatatattttttaatgtcaaacctcaaactaggggttcactgcatcttaggcttaccaggctaatatttctttacttaaccttttccctttatatttgctatcctcttgtgtagtaatcaccataagaagggtacaaactaaattaccctcccattcttttgtatcattctgaaatagtgtcacagagctttgatttttttgccctcatttaatctggcaaatgttctctctatttttttttttttactttcttttgacgggattctcaggcaattgttacggggagcagccagtcacactgtttctgtttattatgcaggtgagttacctgcccctctctgttatgattactgcgtttaagaagaccagcgttacaagacctcttgagggcttcggagttcttatcccttcgaatgagcaacataatggactgaagactctcggtaattgtctggttcacgtgtgtagcgaatcagattttcaaaccctgatttcgtaacattgcaggtactctgttttcatctatgatgtttccagatcgtgctttctccgatatgtatctctatactacctttgttggaggaagcagaaatagagaacttgcaaaagcttcaacgtatgagatatgcaatgttttaaatgtatgctatagtcatcgtttcaaccttttggtgcctttttcttactaatttatcctcctggtttaatgatcttagggatgaattggagcaaatagtttcgtctgatctccaccagctgttgggcactgagggaaaacctacttttgtgaagtattgatatctttcacccaacttaacatgatttgtgcttataatatgttaaataaagtaactgaaatcctgaaattaagactacgaaactgtatggtgacagtcatttttactggaacaatgcattccctttatatgggcacaattacgactcagttctgagagcaatagaaaagatggaaagagatcttcctggacttttttacgcaggtaatctgtcatttgcttgttgcgataaagttcatgtacagttggcatatcaatcaacttgcattctttcttgctaactccaaacaatcaggatcattaacttgtaggctgcagcaacagagagtatctcccaagttgttaggtttcatgtaacctcgtcgctgagatgaaatttccgttggctaaaaagtgaaagttttgtattgatgttacccaaaacaaaagtattttgcatgttgcttgaagttttggttgtttcagatagtacatcctttgacatgaaaataaatggaaaagcgtatgtcaagcaattatcatctagtttctttgtttctagatactagccgcatttgatcccagatcatttttgaggaagtcagctgaaataccgtagctatccttcagttttcataataaaactttaatggatctgatgtacagtaatttagtgtgcaccgggttaataattgatattaacttcatatagtgagtcttataaagatataatgaacttatatacaatatagtggattttattaatggaaaacatatagtgaaactatatgcaatatagtatgatacataaagacttagacaacaagagcattcgaaattacaaagaacaaaggaaagaacaattgtatcaaaccggttcgaatgaacaaacaaccaccacttccacaatcaatgtaccaccaatcaagactaaactataacaatgagcttctagtttaagtctactttgagttttaatcaccaattcaacgattagatgatcaaaattgcaaaggttaagagttggtcaaacctaaccaagagttacactaggcacatagctttgttaggagtatattagtttatgaattctagttaagttagaaatccaatacctagttggattaggattcctaattggattagaattatagtttagttagaattctagtaatagtaggcgtgtgattaggagatataattagcttaattcttatattgttagtttaattcttatcctcgttttaggtttatctttagtcgaacttgtaccctatataaggggcctttatttcattaataatatagtttattttgagtttaaacctttacttgtgattgtttgcttgagaggttattaatcgaaccattaataacttttcaggattgttaagtttttagtgttaaacatcttaatttcaggagtgattttaagagtgtttagattcttgtattcaagtttcaggactgatcttgaatcaagaaatatccctagtttcgactaatatcataagtagttcgaattcttggagtcttttcttcaagattcatattcataacttgattatttagacttcttggttttgtaatcatatcaagtggtatcagttttccagggaggagaggatacaaagggttctctttgatcaaagaagatccaagggcatcaataagaatgacacttgcaataagttcgagtgatacaaacaacttcaagactcgatcttttgctaccaagaaccaatcttgacgcctgaagattgttaggacaaaggataagaagtgtttctacatccaagattgcattctttacgtccaagattgcgtcaagatccattctttaagttcaagaaaggagtagaaagcattcgaacactacttaaacatgacatccgagatggataagctggctatggccatgagtgccttggcacaatcacaaactgagtcacgcaaccacatgggtaggatggaggcacgtgaccgtggattgaaactagatgactatagtggagatggcaatccagaagacttgttggagtggatttgccaactaggcaaagtgagtgattataggggctttgatcacaagaagagattcaaggttgcttccattaggctcacgaagtatgctggaatacggctcgaaggattgcatgcacaaacttcttgcctaatgactatgaacaaaaacagttcataaggctcgcatcaataagccaaaacacacttagtgtacacgaatacagcatggagtttgacaaattagggcttatatgtgacatagaagagaaagagcaatacaagattgcaatgtacattaaagggttgaatcgatatatagccaagaagatcgaagtctcaacttatcacttctttgaggatgtgactaaattggctaagaaattcgaagagcatgacaaagaagaagggcctaagagttcttacacacctaagtatgactctagtgctaaagggaaatcaacagttccctactcaaggtggtcggaaagacctaagaaccccactacacctaaggaggacactagcatggagaagacaaaagtggccgtacctaaggagagtttaattttgtgttttatacatctttgcttaagagcttaacaattgaaactattaataacttttcaggatggttaagtttttagtgttaaacatcttaatttcaggagtgattttaagagtatttagattcttgtattcaagtttcaggagtgatcttgaatcaagaaatatccccttgttcaactattataattgatcttattcgagttcttggagttaatttcttcaagattcatattcatacttgattattagacttcttggtttagtaatcatatcaatatcattagcattaatttacccccagggagattaagaaaggattagcctaatcaaggcgcttaagaagtttttaggaaaaatcgtgcttgttaagcttaagaattgaacttctttcaccatttgcccttgattctcttgttgaactagaagatcttggttcatagtagatgctcctgcatcatagtagagcatttaattttaattttttaacatgcacgaagatgtaggtagtgtagtatatatcgtgagacgtggtttaacatatagaaagatgtagtttctgcatgatatagtgagtttttgcatgatatagtgaatgtctgaatgatacagtggatcgttccgaattgttgtagtttgtatgatatagtatttttgtgaatgatatagtgagtttcttcatgatacaatgggtttctgaatgatatagtggattgcttagaaatgatatagtgagcttttgtatcatgtagtaggtttctatgtgatataggttgttaaaagatgatacatgcttttggcctcatgtactctaatgttaacgtgaacccggtccttgcaagtcaattgcagttttttcaatattaagctatttttttttttttttttttttttttttttttttttttgtacgggaatatttagcatctttaccacaaacataaccatacgaatattatgcggaaattccagtctgaagtcttaacttttcaaaattaaaagcttctatattatttttggaatgaaaaaaaatgagctatggcatgttattttgaaatacaatgagtctcaaggtgcatagtggcttcaattctacgaataatgaatggactactgatttctaattttttgttccgggcttttgcattaggtaaccataaagatggactctctgtgggaagaactatttcctctggatacaaagctgcggagcttgtgatatcctatctcaactctacttaagatgcctaaatgatcgaggagactccgtaagtcctttctctgattctatctttgaactgagtggaaacacgactgtggtctaaagtagttgatgtctcagatatccagaaatggcgttagtgatattcaggagctgtccattgaccctttgattcattgttgcagtttactgaaagttgttagctggtctcagaaaaacgaaaggaaaaaagggggaaaacaaaaacaaagaaacgtagattgtggtgttaaaatcaagaattccagagatttgtaccttctttatcagttgaattgtttacagtgtgaatcaagaagttagctcgaccttcttttcttgtgaatggtaagatttcgtgatcatcaatacttgattgtgctgtttgcaacttcaacggtaagatttcctgatcttacagtttaattgcttgtgctgtttgccactt

SEQ ID NO: 5 - DNA, 1572 bp, synthetic construct
  misc_feature 1..1572: note = d209 mutation Beta vulgaris PPO2
  source 1..1572: mol_type = other DNA
atggtaatgctatacgattctcacctctcaggagtctcaactcatcttcaactatcgcaggcatttcccaggaagaacccattaatggccaaagtgtctgagccgggtaaacccacttctgctaaaaggattgctgttgttggtgctggtgttagtggacttgctgccgcatataagctaaagtcccatggcttgagtgtgacattgtttgaagctgatactagagctggaggaaaactcaaaactgttgcaaaggatggtttgatttgggatgagggggcaaatactatgatagagagtgaagcggaggtcacgagtttactcgatgatcttgggcttcgtgagaagcagcagtttccaattgcacaaaacaaaagatacattgcgagagacggtcgtcctgtgctgataccttcgagtcccattgcacttctcaagagcaatatcctttcagcgcaatctaagctacaacttatgttggagccattcctttggagaaaacgctatgcttctaagatttctgatgagcatgctcaggaaagtgtgggtgagttttttgagcgacattttgggaaagagtttgttgattatctaattgatccttttgtcgcgggtacaagtggagatcctcagtctctttctatgcgtcatgcatttccagaagtatggaatattgagaacaagtttggctcactaatttccggattaattcaatctaaactgtctccaaagaaggaaaagggtggaggaggaaagccttcttctaatgaaaagacacgcatacgtggttcgttttctttccagggtggaatgcagacacttgttgacacaatatgcaatcagtttggtaaagatgaactcaaactacagtgcaaggtcctttcattgtcctacagtcataaggggatcccttcttcagaaaattgggtcgtgtcttctgtgtcaaaaaattccattgaagatcaacaatatgatgctgtcatcgttaccgctccaatcagcaatattaaagaactgaagattctgaaagctggagttccattttcacttgacttcattccagaggtgagttacctgcccctctctgttatgattactgcgtttaagaagaccagcgttacaagacctcttgagggcttcggagttcttatcccttcgaatgagcaacataatggactgaagactctcggtactctgttttcatctatgatgtttccagatcgtgctttctccgatatgtatctctatactacctttgttggaggaagcagaaatagagaacttgcaaaagcttcaacggatgaattggagcaaatagtttcgtctgatctccaccagctgttgggcactgagggaaaacctacttttgtgaatcatttttactggaacaatgcattccctttatatgggcacaattacgactcagttctgagagcaatagaaaagatggaaagagatcttcctggacttttttacgcaggtaaccataaagatggactctctgtgggaagaactatttcctctggatacaaagctgcggagcttgtgatatcctatctcaactctacttaa

SEQ ID NO: 6 - protein, 523 aa, synthetic construct
  REGION 1..523: note = dG208 or dG209 mutant protein of Beta vulgaris PPO2
MVMLYDSHLSGVSTHLQLSQAFPRKNPLMAKVSEPGKPTSAKRIAVVGAGVSGLAAAYKLKSHGLSVTLFEADTRAGGKLKTVAKDGLIWDEGANTMIESEAEVTSLLDDLGLREKQQFPIAQNKRYIARDGRPVLIPSSPIALLKSNILSAQSKLQLMLEPFLWRKRYASKISDEHAQESVGEFFERHFGKEFVDYLIDPFVAGTSGDPQSLSMRHAFPEVWNIENKFGSLISGLIQSKLSPKKEKGGGGKPSSNEKTRIRGSFSFQGGMQTLVDTICNQFGKDELKLQCKVLSLSYSHKGIPSSENWVVSSVSKNSIEDQQYDAVIVTAPISNIKELKILKAGVPFSLDFIPEVSYLPLSVMITAFKKTSVTRPLEGFGVLIPSNEQHNGLKTLGTLFSSMMFPDRAFSDMYLYTTFVGGSRNRELAKASTDELEQIVSSDLHQLLGTEGKPTFVNHFYWNNAFPLYGHNYDSVLRAIEKMERDLPGLFYAGNHKDGLSVGRTISSGYKAAELVISYLNST

SEQ ID NO: 7 - DNA, 37009 bp, synthetic construct
  misc_feature 1..37009: note = R126A mutated Beta vulgaris PPO2
  variation 3684: note = n is any nucleotide
  source 1..37009: mol_type = other DNA
tattccatcgaatgtagcaaattgactgtccgttgcaatttcggagtttccactcgtcgcatggtaaatggtaatgctatacgattctcacctctcaggagtctcaactcatcttcaactatcgcaggcatttcccaggaagaacccattaatggccaaagtgtctgagccgggtaaacccagtaagtcaaacattcgaatcacaactcaagcaaatttgtcttgtttgcgttatattttgctcatttcagccttttttgtttttccgacctttgcatactgaatattgtgtgtgtgtgtgtgtggggtttcagcttctgctaaaaggattgctgttgttggtgctggtgttaggtaaattttcgtctcttgcagagtttttgagtcatttgggaattctatgtgaaacttgtaactcccttcagtccaacgaacgcagtacaattttctatcaaatcatggtcctaatttccaattttccatatatattgttggaattatattgggattgtctatcactattaatagtattaggatcaattgtagagaagcacagaaatttttgggatcgaaagaatatctggattgccacattaacagcagatataattcttccaattggtttttggttcttcctaccttgacttgtctggtcaaacattataaactttaacctttaatatccattaaagtaaactataggatttttttgtctaaaacatgcttatataacatgaaatttgtgagaaaccaccttatatatatttttttgcgaaaacaaaccttaaacaaaattattatcgtgagaacaaaccttatgccaatttcgatcattgacccaaggttttggcattgaccgtgtcatgaattttgttgggtttaaaaagtcatgtgtcttgcatacgaaatggtaaatgcgggaaccttgggtcaatgtttggaatccgcataaggtttgttctcccaaaaaatgtttttgttcaaggtttgtttttgcaaaaaaacttatataaggtgctttctcagaaatttcatgttttataaagtagtatttgacaaaaaaccctaaaatatattatagaattattattgactaaattgtgtaaaaatgtactcttctaaaagtacattatagtattttagtggaacatttgcgagaaactactttataaatacgatttttgcgagaaatttcctaataaaaaaatgtgaagtgcaaaactatcttattgataattttctactccctcaaatccaaaatactatgaagtctttcctttctggtttgtcccagattagtttgtacgcttccatctttggtatgatcccacttttattatacttattagttttacgtgagttccttactctatctcttttaacaaaaatactcaactatctctatccaataaaaagttccttactagtcctatcacatctgctttttaataaaataacgtttgataaccacacaacttatatccttaaaatacacgttcaaccaagtgttgagattaatttggacggagggaataaatattttttgaggcatattggtagcagtattcggattccgataggttgactatgtttccaatgttgaccaacacttgccttgcatgtaattctaactttgctcttttttattcttcatttccctcgtattccatatacaatgtttagagacccattccttcctcttctcttctttcccttccttactatgctttgccataatcttcctcaaatgagtgcaaattaatttgtcgttgatgtaggccaactgattgtagcacatcttcatagttcatacctcaacacactcgtaattatattataccctacatgttaaatggctcatgaagctttattttatatcatacttcctccgtttcacaataagtgtaacacttttcttatttggaataatcacaataagtgaaaccaagctccaaatggtaagaaaagttcactcttattacaaatataccaccaaaaagtaagaggggatcacaacttcaatacttcttcactctactttattgtggtcccaactttctctctctaaattccttggtaactccccactttctctatgtttcacttatggtgaaatggaggaagtattttgtagtggtatttagctactaggccttggatgatatacaatcatacaatgtatttatattcacgataatttgctgcccaccttgattaccatgatttccaccaattttatcaatttcagtacttcaccaccccgaatttatattttttatttccaaccttggtatctccatttgtctgagtgcccgatccatttgtatcgcctccagaattgaagaagcttcctgcagctagacaattaggaaggttaaaaaagtttggagatggtggaggatagccataataatcattgttgggaggtggaacttggaaggttattgtagggttgaagtccttgatgaagaagaattgagttcaaatgagaggaaaaaggagcagggaagagggacaataagaaaaaaaagggtaaactaaaatcacgtgtaaggcatgtgcagatcaacatcagaaagcatagtcaacctactggtattagggcactgatacctttttgggtcaaaatttttttacaaggtatttcatgaggtagttttgtccatttttttttttacaaggtatcgtctcattttttttttatcatttagtttctcgcaataagtgtatttcatgaggtagttttttccaaaatttcctcatttattataaaatacctcatcttttccataaataatgcaatgtctagacttttacgctgtttacacatgctcctttgaccatctattgacacacaaggaaaaatagagtagagtcatgcaggatcttgttagatttttctcgatatatactttcaaaagatcaatttttttataattttttttttgaggggattttttttttataattatgtacttatcaaaggtcaaagttgtgcaccgggaagcataaaactctatgtgttgcaatttacatggaaggggaggagtataataagagaaaattatggtaaaaggttcattcctggagatcatgagaaaggaagtagaaagaacaaaaaagaacaatgggagtgcttttcaatgtttgttgtacgtagcatttattcatttgctataatgttttgtgacattgtagtggacttgctgccgcatataagctaaagtcccatggcttgagtgtgacattgtttgaagctgatactagagctggaggaaaactcaaaactgttgcaaaggatggtttgatttgggatgagggggcaaatactatggtaatgtttttgattattgcaggtcttgcactttagcgcacaattaatttctggatttttttttgtactgtggtggttatggtcatcaacatgtctcacccactgtgcttgcagatagagagtgaagcggaggtcacgagtttactcgatgatcttgggcttcgtgagaagcagcagtttgtaagtctttcattatctgaatggcacatactttatttcgaaagattgtaattgccttttctttctagatggcttcatcttcatgttgctttctgattcagtttcgtggctaactttccaagtttgtctgattgctaactctgtcatagccaattgcacaaaacaaagcntacattgcgagagacggtcgtcctgtgctggtaagtttgcttgttttacttttgacctcttttaagatctttcaactctggagcctggaaacatggtgatgcaggaggcaagttctctctattttacatcctttcttctctgtatcttatgacatttgcctcttattctgtgcagataccttcgagtcccattgcacttctcaagagcaatatcctttcagcgcaatctaaggtcgttttatgttaagacatacttgatgctgagagtttattgaattcttaaccttcttcttattttttttttatttttttagcaaaaggtaagtatattgcatttaccaaaaaacagtatgtacaccaccacagcagccatgtcagaatctagaaataccaccgaaaaaatcctacacccaaccagagacagttatattatatcctactcctaagtttctgtacccaatttacatcaatattggtccatttacaagatatttttataattcacagaagcacatcagttttaattagtttaataatgacctctggatgaataaccaactcagaccatatagccttattcctggctttccggaagttgtacgccagagcagcaagcacagcaatgcaaacctgtttcttatacctccttttatgtgtcttagcccatctcttatagctagtgaagatacagtcgtgtgcacaggattgaaccccaatccaactagcgaaagcctcacaacattatgactataaatacatctgaagtataaatgctgcacctttttctcctcttgcctgcacggtatcagaacaaatcccagctttagctaacaattccctggttttcagtttattcaatgccatcatgcaagcaatgaaagaatgttttggaacattcagtttgttccaaacacagtgagagcaagggacctttcctgcagttccacttagccacttatatccctgactaatagtatgactctttgcaccgtaaattgatttcaacttaactttttcataagcagtgaattgtgtgttgttagagtgtctagctgtctaggagattgggagaaaaggagggaccaaggagatagaaacacacctttgtgtttctttgtgtatttactttttagggtgggtcacgttttctgagaaatttgggaaaaggaagaaatagtaacacactttcccatttgtataacctgtatactggagctccaatataatttgcatttttttttgagctgcaagaatatgttgacaaacagttattgcttcttcctcagctacaacttatgttggagccattcctttggagaaaacgctatgcttctaagatttctgatgagcatgctcaggaaaggtaatgtcaagacatgtgttacctcgccttaattttcgttccaggaggtgagcatgcatttagaactaaaaggcacaaagactgttggtggtcttgcctgttcaaatataatggagaggagttttcgctacatttaccctctcttgaagtggggttgaaatatagcatcaagttgaatgcttgattaagtttaaaggacttgtgtaactctttttctgtttactgtgattacatgacctggttgattaacataatggtctgtttatctgtagtgtgggtgagttttttgagcgacattttgggaaagaggtaatggtttaccatagtatttctgctttagtggtaaattgtaatgttgctgataattatacttcgctgcagtttgttgattatctaattgatccttttgtcgcgggtacaagtggaggagatcctcagtctctttctgtaagtgaacattttgtgcttcactcccaattttttggaggctggaaatagattcttttccagttgttctgtcaaaaatagatgtagctttattttgaatttgaagttcccaattgttcattttgactattactgattattgctaagagtggcattatgctattatgctcctaaaagaaaggtgaattttgacctacatatagtataatgtatcaatattggtttaattgtttgttcttttgttccttttggtgctcatcttgcgccttgttctcatcgctcgttttttcatgttgcacttgatttaaatttgctcagcttaacttgtctttttgaatttatattacttattgctatattttactaatttcgttgaaactaattttttgctgaacttttcgttttgttgaaatcatttttctgaattaacttgattttcctgaatagaattgaattttggtgatcttaccttttctgcagccttttatttctttcttgtcctttttccaatctcatttttttatatttccattgtgttgacatcttatcattaactgtgcagatgcgtcatgcatttccagaagtatggaatattgagaacaagtatggaccataagacgtttattttaatcgacatgtatgtttcttagtttatacatatattaattctgtggtaaaaaaaccgaacaagaatatctttttttttttctatcatcaaaaagggtgaatatatgtagaggaaaaagatttgaatcaagatattagcctaaagcaataataatgttagtaatagctttaataacaaattcaaaacgtacattaatgaaccgagaggccggaaaatagttaaagtgaccactaagagaagcgaaggattcatgatgggttttcaacccagtagggcaaatttgttcaatgttctttacaaatcaagcttattaccttgtgggtgtttttgctagagatgaatgatagaattttccctagttggaagtcttttttggttactttatgggagctagtgatgtaatttgtttcgccttatggcatttcctaacatgtgcttttgtgatgtattgaagctttttttttgccttaatttatgctggattttaattttgttctttgtttcatttttcttgcttttgaaaaaaatatatagatatgtatatattaggattggtcgaggattttgagggaagggaaagacctaagaaaacttggatgagggtgattgatagtgatatgagtctatttgggatcgaagaaaatattcctttggataaggtgtagtggagggttgagggagcaaatttatgcagattagcttgacttaaagtttttctttttgattatttttcatttacttgtgttttgcaaacatttactcatgaatgatgtaaacttcttcaaccaaatctctggaaaaaaataatctacatggaaaaaacattattaatgttaacttgacagagatcccatccttgtgaagcagctagcaattaggcatctaacaattgacattttaatggacaggatagaatgtctcttgatagtcaataccctctgtttcattgtatcccatagctactaatctagtttgtatctttccaaagaaccattattttgaagtttcaccttgaacacccattttgaaccaatatgtttcttgcccttggggagaggggctaattgccatgttttgatgcggatgcaaagacacttgttctacctgagcctattgacttgatcatggatactctagggtttgaactcaagggaaagaatcaagtcttggcatgtgtggtgacatggcgtggggatggagtaaagaagagtcatagttctgttaggatatgttcttgcttgctacatagaatcgtagttctgttaggattgctatgatattatatctagtagatagattttatagttaattaggataaacatgtgatgatcatgttataataggcatgtgattagaggataggattagcttaattcttatcttgttgttagtttaattcttatcctagttttatgtttatcttagtcgaagttgtagccatataaagggcgttccattcattaataatacttagttttgctttgtgttttaaacatacttcttgattattgtttgcttgtgagctaactaatcaaaccattaaagacttttcaggagttttagtgctaaacatcttaatttcaggagtgattttaagagcgtttagtgatcttgaatcaagaaatatccttgttcttgttcgactaatatcagtggttttgttcgagttcttggagttaatctcttcaagattcttattcaacttgattgttgagcttattggtttagtaatcatatcaagtggtatcagttttccagggaggagaggatagataggattctctttgatcaacaaagatccaagggctatcaacaaggttcaaacattgctgcttgttcaagacttgatctttttctaccaagatgcattctttacgtcacaaggtagtaataacaagattaagagtggtttttacatccaagaatcaatctttcacgtccaagatttcatctttcacgtctaagattcattctttaagatcaagaaagttataacaagcatagaagaacacataaccatggagtccgagatggacaagcttgccaaagctatgcaagcacttgcaaagtcgcaaactgaatcacagagtcgactcaatgagaatactaccacaatcaatgggattggtagtaacatgaataggttggaggcacgcatggatgccattgcaaccatcatacaaaagaagcttgatcggaatagtgccaacttcataggtgccaattcagaggaagagttggcagaacgtgaagaaagatcatccaagactacatacaatgatgatcgtggcttaaagttggatgactataatggagatagcaatcgagaagacttgttacagtggattcgacaacttgagaaggtatgtgattatagaggctttgatgacaagaaaagattcaggattgcctccataagactcacgaaatatgctggaatttggcttgaaagcttcaaggcacaacgagccaagaaaggtaaagaaaagttgtgtagttggacaaagttgaaagttcaagcttaaagagaagttcttgcctagtgactatgaacaaaaatagttcataagactctctactataagccaagacacgcttagtgtacatgagtacaccatggaatttgacaagctagggcttatatttgacatagaggagaaagaacaatggaagattgcaagatacatcaaaggcttgaaccgccacattgccaagaaggtggaagtatccacttatcacacctttgaggatgtgacaaagttggctaagaagtttgaagaacatgagaaggaagagaagcctaagagttcttacacgcctaagtatgatactaatgctaaggccaaggctagcttcctactcaaagtggtatgaaggacctaagaggctaagaacctcaccccacctaaagaagacacaagagttgagaagcctaaagtcgtcgttccaaaggagaaatttgaagagatgagaaagtgcttcaagtgtcaaggaaggagacacatagcaagcaattgtcctaacaaaagagtcctcaccatgagacaatacctagctttgcaagaagaggaggatgtctattagttcgtccctgatgaagagcaaacttaggggaagaagaggaggaggatgcttttgctgaggatgatgcaaggctagtaggggtcaagaggcgcaccttacatgtcgaccatacacctagcatggagcaaatggaaaaatcttttccacactagatgcaaggtaggtgactatatatgtaatggtataatagatagtggttcttgcactaatgttattgtatctgaggtagtgtcaaagctaaacttagctacaagggcacaccctaagccatacaagttgagtttgctagatgatagcactggcatgagagtaaagaaacaagctttgatttcattctctataggggttataaggatgagttatggggtgatgtattgcctatgagtgcatgtcatctcttgcttggaagaccattgcagtttgataaaaaggtcatccatgagggggactctaatgtgtactctgtgttggttggttctaagagggtatgtttgcatcccttagctcctcattcagtggcgccaaagcaaccacctaagacaccaagttactttctatcttcaagggagttcgaacaagaggtggaggaagaaggttgtgcttatgccttgattgtaagacatgctgccacaagtgtcaagactactagcaatgagaagctcgaagccttgatgaaagagtttgaggatgtctttctagaggaactacgacccttgagaggcatagaacatgctgtagaccttgtacctggcgcccctttgcctaacaagcctgcttataagtgtgatccagtggcatctagggaattgcaacgccaaattgaggacctaattgaaaagggctatttaagggagatcatgagtccatgtgttgtgccagctttactagttcctaagaaagatgacacatggaggatgtgcatagatagtagagcagtgaacaacattacagtcaagtaaaggtttcctatgcctagattggaagatatgttggataagttacatggggcatcaatcttttctaagattgatcttcgaagtggctaccaccaaatgaggatcagagaaggtgatgagtggaaaacaacattcaagaccaagcagggattgtatgagtggatggtgatgccatttgccttatgcaatgcgccaagctctttcatgagcttgatgaatgaggtacttcgtccgttccttaacaagtttgtggttgtttacatagatgatatacatatctatagccaaaatgtggaggaacacttgttgaacttgcgtagcttattcatgaagcttagagagcaccaactctatggtaagattgatggcgacgaggttgacgggggattatggcggcagtgaatcaccctctttgccggtcactgaaatacaacctgaggtatctttaaattctgtaattggattgactaacccaaaaactatgaaattgctgggaaaaattgctggatgtgaagttgtggtgatgattgaccctggggcaacccataattttttatcactagctactgttgagaaattagctattcctgtgtcggaatcggaaggatttggggtttctctaggggatggacaggcggtgaggggtagtggaatttgtagaggggtgttattgagtttaaatggtggagttgaagtggaaacagattttcagcctctgggtcttggtaattcggacgtgattttgggtgtacagtggctggagacgttggggacagtggagagcaattggaaaacacaaacaatggggtttgaaatcgagggtgtcaagttcactttgaaggtgacccatcactggcgaggtctcgaatctcactcaaagccatgatacgtaccttatgtaaagagggtggaggtttgtggcttgagttgaaccagattgagcattatcaggagaaaacaccgcattcatcagccttacctgaaattccagttttcttacagagagtccttacccaatttcagtctgtgtttgctacaccagaaggcttaccaccgataagagaacatgaacatgcaatagttcttagagaagggtgtaatccggtaggggtaataccgtaccgttatccacagttccaaaaagatgagatagagcgcctcatcaaagaaatgttggcttccggaatcatcaatccttccacgagccctttctcgagcccggtgatattagtgaagaagaaagatgggtcgtggcggttttgtgtagactatcgggccctcaataaagaaacggtccccgataagtatcccattcccgtgattgatgaattgttggatgagcttcatggggcaacacttttttcaaaactcgacttaagggccgggtatcaccagatccgggttaaggccgaagacactctcaaaacagcttttcgcactcatgaggggcattacgagtttttagtaatgccatttgggttgacaaacgcgccggcaacgtttcaatcccttatgaacgaggtcttcaaaccattcttgcgcaagtttgtcttggtatttttcgacgatatattggtctacagtagttctgccaggaacatgaggagcatttgaccttggtgttgcacaccctagcagctcataaattgtttgtgaatcagaagaaatgtgattttggcaggtcggaagtagcatatatggggcatatcatctctggtcaaggggtggctgtggatatggagaaggttcaagcgatggtggaatggccccttcctaaaaacctccgggaattacggggatttttgggccttacagggtactaccgcaaattcgtacttcactatgctcatatagccaagcctttaactgatcaactcaagagagatgcgtttgggtggtctgaggcagcaactcaagcctttgaaaagctcaagaaggcgatgatcacatcccctgttttggcaatgccggacttccaagagttgtttgtggttgagaccgacgcatccgggtatggtctgggggcagtgttaatgcaaaacaaccgacccattgccttttacagtaagttgttaggtgcccgggctcaattaaagtcgatctacgaaatggagttgatggccatctgcatggcagttcagaattggagatattatctgctgggtcgacatttcctcattcgtacagaccaacagagtttacgtcatctcactcagcagcgagaagtaagtactgccttccaacgttggatgagtaaacttatggggttcgattttgaaatacagtttaagccggggtgtgccaaccgggtagctgatgcattatcccgcaagacagtgggagaggttgaattgggtgcgctgatattaactcatggggtggactggaccgacttggagcgtgaaattgaaggcgatcctctgttgtgcaaaattaaacaagacttccacgggggtgctattactcctgtgcacttttctttggtggacaacaagctgttgttcaagggtcgatacgtgattcccagctcttcggtttttattcctaccttgctgcgagaatatcacgattctcccattggagggcattcgggggacctcaaaacatatctcaggatggctgccgactggtattggaggggcatgcgcaaggatgtggcgcggtatgtgcaacattgtagcgtgtgtcaacaacaaaaaatgtctcaacagatgccagggggggtactacaaccactccccataccttcctcggtttgggatgacttgtcaatggacttcgtggaaggcttgccatcttccaagggggtaaacaccatcctcgtggtggtcgatcgtttgtctaagtacgcccacttcctcccactacgtcatccatttactgctgtgtcggtggcaaatgtgtttgtcaaagaggtggttcgtttgcatgggtttccttcctccattgtttcagatcgggatcgaatttttatgagtgtgttttggcgggaattatttcgtttacatgacaccacactcaaacgaagtaccgcgtatcatcctcaaacggatggtcagtccgaaatcgtcaatcgagctctggagacttatttgcgttgctttgtgggggaatacccgcgctcttgggctcagtggcttgggccgaattttcatataatacttctcctcatctctctaccaaaatgaccccgtcaaggtcctttatggtagagaccctcctactgtgatacgggttaatcggggagcctcacctgttgaaagcttggaaaacatgctccaagagcgagacgcagtattagatgccttgcagattaatctgattaaagctcaacagaaaatgaagagtagtgctgatgctacaagaagagaggtgcattttaaggtgggagatcgagtgtacttaaaattacagccttaccgtcagaaatctttggcttaacgcccttatgagaagttagccgcccgtttctacggaccatttactattttacagaagattgggcaagctgcatacaagttacaacttcctgtttctagcaaggtgcatccggtgtttcatgtctcccaactgaaacaggccgttggttccattcccgtttcagccactattccagagcaattgtcttctgacttggagttagaggtggaacctgatgaactcctcgatgttcgtagtgtttctagaggccagcacacttacttggaagctctcattcagtggcagggattaccatcattcgaagctacctgggaagatgtggctgctttccatcaccattttccatccttccaccttgaggacaaggtgaaactttgggggggtggtaatgtgatgcaccaaactaccactccactactcacctattagaggcgtaagaaaaagggggtaaatcaggaatagtttacaaattctgttgaaaggaatattttgtaattatgatgtcagaggttgttagcaaaaaggcagtagagtaacaataaaaaggggaagggaggagagaagaaggtattgagatttttgtaaggaacttggcccttgggagagttgggagcctctcgaaagctcaccattatcttgtgaatattttccttcctggttatatacaagaaccttcctctgtcaatttcttttctctctaatcttatttcttattctgttttctggttgccattgtttgaagttgcttgttgtgcttgagtaaatacgtgaagtggtgaaacccatctgaattcatcacatctattccaagtggtataatacaagcttgtaatccaaatctaatgagaaatctaagttatgaagaatttcaaaagaactaagtacccttgttttggatgcccaaggatttacttgccgctcaagttaatgctcaacgtgcaagatacaacctctttagtatcccaaggtagtttccataagaattaattgagctcaaatcaagaacaatatttttatgtattaatgtgaacacttcctgaattatattagatatatggtctgaaggttggaagaaagattagcttttaattttaagtttgagatagtttttagaatcgaggaaagattagctcttaacttgtaaactaaggattgctttataagtaaaacattagttatggaactcttaaaattggttttgaacatttctagttaaaaatcccatgtaattctcccaaactagcttaaaatctcacatttcacaagctaaggagagacaaatggcgttctcttgtgaaacaatctaaaattttcattaggctactgttttcaagtatttatatgttagaagtgccgcatataggtacataaaataagtttacaaacacaagtaggaataaggaaaactaaaagagaaacttcagccatacaaaaccggctgaaatcagctactactttctactttctagcttcaaaatctgattgcaagtctcctttaagccaatcaccaatgaaaacctttcctccacatgaagtgtgctcaaatcaagagaagaaacccatcattcgcctatagctacctgggtcagatgaagatacggcaaaaaaaacgctggaaatcagtgaaccaaaataagcaccaattggatgctttctgtccttgctacattttcttctcataggactacttcaagccatacatgaataagcagttagatccagctcctagcatccatttgatcgtacaaatgagctccaaaaagataagtaaaaccaagcagccaaaacctaattaatactaatgatgaattagttgaatagctaatgacgatgaagcaacactttagtaggaatagtgttaattatgatcaatgctacttaatcttctgattaatttttggaaaaatgtcatatctaccttctgtatacacttattcataactatatcgtattattattatttttaaataactaccttttaagtaccaaaacctaagaaatcaggcacttgatggattccatccaaagatccatttggcggggcccactaactgacttttgattttttgcctttcctcttttggttaatctcaatggttcatcaataacaactcaatcttctccccatttcatcaaatcatccctaaatcagaactttttcaaattcacccaaatgaggttatggaaacctctaccaagtttattcgaccacttttagtctagctcaaagttttacacttgcttcaaaaactaagatttattaactttagaaattaggtttttatttttattttttatttaactttgtaacaatcttaaataactcaggtgctttctagagtttggctttaattgtttttcccttggttatgtgaaagaagtatgactactttctccaagactaaagtagagagcaaaaaatgcaattctggaatttcttgcaaaagaaaaggaacgagttaatgataatgaaaaacaaagaaaatgatgagaagagaggagctgaatcaatcatgatcatgtattttaaagttttttttgctattgaagtgacttaagaagaggaaagaggatgagtgaagacaaacaaaagaaaggataaatagagggaaatcttgggcttagaaaggtgaaaaggtaagaagatgagttagtgggccccaacaaatgtatctttggatataatccgtcatgccactgtttggggcttgcttaagtccatacattacttcactaattttacaaaatttattttcttgaccaagaactgaaaaaaccttcagtggtgatctattaggttttggaagttaaaaggtagttatttaaatgtttttaatataaaaggtagttatttagatatttttaatataaaaggtagttatgtgaataaaagtgtatataaaatgtaattttttgacatttttgccttagtttttcttgctaattcaccttttcaacttgaccaagttgctatgaggagaaaacgagcaattattaagcaaatcgcaacactagcattaatccatggcccatgaaactctccataattagagattggattagcacttagtagaacttcttgctcctgctccaggtttccattacttctttatctaagtgcatcaaaaggttgttgggttatgaaaggtggtggttgtgtatagtcattgtcaaaatgttgttaatgcactctatttagaggatgagggattgaatagttttcacctcgtgacctttcattcctttttaaaaaaattgataatgtgtattggtcctatgactgtatgaatggtaataagctatctcatgagctgttactatcttcctcagagtctaggtagaagggtttgggctgataattttctactatgtgcaattagtttgttggatttggatatgctagttgatataggtcctttcccttgggccttctcttaatataggcctacagtgtgattgaagataaatcttctggagaatataagaacaatgagatggattggttagaggttgatttgttcttttggtgtaagactatttcgggttctctattggttatgttcagacgccagaatatgtgttggtgattgttttccatgaacatactttatccgcagagacatttttcttttttcttcctataagattatatttgtttcctctcttggtgctcatctcagtgtctctactttacgttaaactgttgacattacttgacaatgcgtatatttgtcgcatggtgctcttccctcactccacgtcgaccccatacatcaaaaaatgccattaaagaatattcgaactcacaaccttgtgttgaaagaatggaatccctaccaatgactcattaattcattttctctttaagaaataaatgatttcctcacaaacttttaggctttaagagcccaaaagataaaaacataaaataagatagacatcaacgtcaagattagccttaaatgcacaaagcacatgtcaaatgattgataactactcacgagttgcaactctttgggcgttgcctaatattaattggatctcttttaaaaattgttggtggttatggttggtggagaggaccatgtaacttttagctggtcacaactggtaatgattgtcacttttactgcccataaaaaaatttaaactgttgaatatgtttctggcagtggatctgacaaatcctttacaagttggcgtccattttgttttgccatgtgactcaattataatacgtgagttttattatccaccaggtttggctcactaatttccggattaattcaatctaaactgtctccaaagaaggaaaagggtggaggaggaaagccttcttctaatgaaaagacacgcatacgtggttcgttttctttccagggtggaatgcaggtattagcatgtagctttcattctgttaacatttgtggttcttccagacatacatccaatgctttttttttttcttgctataaccataaacattcttgtcatgaacattctttaatactgttgctgagcttagtgtattcgttcattcatgtaatttcctctcttgaggttaaaatggcatacagccttacaacctatatccataatgctccttagagtagaatccctaggttataacatagtaccacttatcaaaataaacatggcacacactgcaggacaagaagtaaatccacctagagaactgagcacctagtagtaaaagcagcgatacattactaataacagtagcagggccataagagtagtaaatgggcctcatttcaacactccccccgtaatggtgagagagaagaagcagtctgaactcccagcttggagagcaaaatagagtgttgctgaacagggagaaccttagtgaaaacatctggcacttgatcttgagatggaacataggtaggctgaataaccccttcttcatttgtattgtccctcaggaaatgacaatctatgtctacatgcttggttttctcatgatgaactagatatgctgctatggcaagagcagcttggttatcacagtagataggagtagcactggactttttaatgcgaagatctttgaggagttgtttgatccacatcacctcacacacagcaagagccatggatctgtactctgcactgaccacaagaaattgcctctttgactttcaagatacggggggagtcaccaaggagcacacaaaaccagatgtagaatttacaacacccatcccattcactatcacaaaatgctgttagttgagcactagacttgttcgccatgagaattcaccctgttggcagcttgaagatgcacattagtggggcagtgcataaatttgcttaaatcatgtatagtgaaggcaatatcaggcattgccttgtaatagtgagataaatgagcttccccatcaatttttgatacacatcaggttgttgaagaggatcaccattgtcagcatagagcttgacatgtgagtccatacgaagcctcaatcgtctgcaatttataaaaccatattcatcaacaagacccatcacatacttctttagagataaaaacgatacttcactacactgatccacttcaatcctcaaaaaatatcttaggccacccatatctttcatgtgaaattggccagcgaagaaactctttgcttcctcaatagttgctaaactattgccagcaagaatgaggtcgtccacatacaccaatatagcactgaaacagtgagagttttgcttgaagaatagagagtagtcacacttggattaagtgaatacattttgctttaaagcagtgttagcttggcaaaccattgcctcaaagcctacttcaagccataaagtgacttaagcagcttgcacaccttagttcatttggtgtcacttctgccatcagtacttagctccccctctccttgaactttgatcctgttacatgtttcactatatcctggtgatagcttcatgtatacactatcctacaattcaccatgcaaaaaagcatttttaacatccatttgtttgcaagaaccaaccctctaaggatgcaacaacaagcatgtggtcatctttgctacaggggtaaaagtctgctcataatctattccatatctctgtctgtcacccatgattacaagccttggcttatgcctattatttgtgccatcagtgctgtattttgttctgatccatccatgtgagggatggctcatttctacaaaatcctagttccgttaggatttgtgttgttttcctaattctagtaggaataggactcctaaaatcctaatcctcctagttctgttaggagtttaaaagttttagtttgattgtaattctagttgtgttagaaatccaaatcctagattcatgtcacgtatggttagaacatggctagtaggataatttgtcttgtgatgtccatagccttggcatttgtggcacctaactttcaatagcttgtcttctgtctccttttctttctccttctttgaggaatcaacgtttttagagctatctaaaccactagcatcaatattaggtttaaaagtgctaaaagatttcgaatagttcttacttgcatacaatttctttttctagtttatgtagcgtcaccagggaacaaaaactcggccgttccgttctggaacggccgctttgtaacggatttcagagaggccgttccgttaaataccgttctagaacggtgatttggaattcacaccaaactcggcgcgatagcgttacgtaacggtgtaacggcgttccagaaccgttacaatcacataacgtccgttatttgaagaagaccagttcttttggtggaggaagaagaagagccaacgcaagatctatagatctgagttaaaatttgaaaataaaacatgtttttttatttaaattaaagcttacagaggatgtagaactcaaattcgagtaaacccctcctttaatttcattaggttactgcaaatcgaaccctaaattgcaaaccctaatttcgaaaaaaccctaatatgcattgggatgcaacgctgcttctccggtcatggcagagaaggtcgacgagtcatcttcggctgcttttagcactgtagctgccggtggttggcttgtttgcaggttagtgcttgctggttttctttctctcataccgatcatcttcttcttttctctcttctctttttcttttttattgtgtgactgccagtcacgtgataattgcaactcataaagtatctctttctctctcttcttttcatccctttttatttttctttcccttttagtttttattccctcacgtggaatcacctaattttcatccttttttatttttttagttacactcttacacagaagtatgttcaaatatcattatagtacctcaaatattgtatttataagagttttggacataatatgatatagaaagtaaaatagaagaaaaataaagtttaaatgtcacttgtgtgatttttttaaaaaaattcacgccgcgacggccgcgaaacgttctatttcccgttacaagccgttcccgcgataacgcgaccgttcccgcgaacgcgaccgcgaccgcgttttttttccttgagcgtcacatcttgcaagcttcttcaaaggtgagttatgtgtacaactccaatttctctccaatcccctccgtcctcatttaggcctccaaggaagctacttaaacattgatcttcaagttcatcaattttccaaagaatggataacttctcgaactcctttatgtaatcttcaacggacatattcccttgtttaagagtagaccattccatgtacaagctttgtttgtagttagaaggaacaaaacgtcctcttaacaactttttaagcttatcccaagtagagattttgggtttattagctttcacacgctgcctctttactccatccaaccaaatagatgcatatttggttaccttaagcacggccaccttgtatttcttttcttttggtgtctcttaatcccaagtagagcttttgcgtgtgaaagctaataaacacaaaatctctacttgggataatcttcttcttgtttccgaaacaactaattcttatggtagttaggaaagcaagaatggtttctaattcaatagggaatatattaattattattagtttaagttaaatagtgcacgaatctaaatagattattcgtctcaaaatctcacttaagtatagatttgtttggacatctgagggaagaagaagagagcgagataaaggagaattatcactcaatgaatccatatcccgagttttcccatttacttctttgaaagcaatatagttcacgaggtcttattatcagtctatggacataagagtaataatttaagggcaaaaactatgactttatgggtttaaactgatacatgttctgttaaactgatagatgttctgtgttaaaccgatactcatatattcctggttaaactgatagatatatgatttaaattgatacccgtctcagtcatgtcttggattgagacggtctgacacaagactttttgtgtattatatatctgattagaataaatttatcctgtttactaattattttatcttctccagacacttgttgacacaatatgcaatcagtttggtaaagatgaactcaaactacagtgcaaggtcctttcattgtcctacagtcataaggggatcccttcttcagaaaattgggtcgtgtcttctgtgtcaaaaaattccattgaagatcaacaatatgatgctgtcatcgttaccgtgagttttactttgcttactgctattgcaccaatctttcttcttttgacacactgataatggcaatgctgttgtggtttgaagccatgttatggggttttagggatatttatggagtctgatctaatatgttattggataaaattcagatctgtaacgtgactcaatgagattgaaaaaaattgaatcaagataatggattggaaaattaggagctaacctagggtctataagcgatccacttggagtctcataccaagcaggtattcgacattttaggtttatattgctgctatggctcatatgggagcctacatagggtctggtgcttattcctttttcttttgtctagttttggggctgcacatttctgttgtgttttgatatggatagccatcacctgcaattgcatggaggctgaactaagttctataggggagcaaacagtatctgttggaaatttattttcatattgtgtttttaaatgctataatccaaaatttgttgttcccctaaaatgcctaaaatacccttatgtaactgctccatctgtcccttaatagacttcccatttctccaatgcatgtttgccaatacacattttgtattgttaatatcaaaaattacatattagtaaaaattataaaagtttgattttcctaatgtacgcaatgagacgaatcaaacaagacgccatatgactatgttttttcttatacttcctatgttttttaataagtgacatgttttccttttagggaaatgtcacaataagtgacacatagctcaaagtagtaaaaatacttctcatttattacatctttgccattatttaattgtttcacctacctactttatccaatactcaaatttgattggttgaacaattggtcccaactttctctagactccttggtattccctttcccccactttctctctgtgtcacttattaaaaaatggaggacgtatattggaaaaaaattggaaggttttcttcacttatgaatagtggtaaaattagagatgggaaggctattttgggatggatggagtaatatttaaatttttaaaataatgtcattgttttagtgatgaaataaaattcaaggctattttttctagtaattatgttatctgtacatcaccacacgtatcgcgtgcatataagactagtttgatgatattccaacactgttcgaaggaagtcaggcatggaaccatgtttgcttccatatgggaaatattttgcttactctccttcaaacatctacctcattatcccagaatgattgatcgaatctaatacaaatatacaattgatcatatgccaccagggaattacatcaaattaaatttttatagaaggggaatcagtcatagcctcatagggaacgaataagtgatactcgccagtttctttcctggttacttttcctcttctcactagccatcctttatgtatgggtatgctgcatcattcctgccactggttgggactcccgtttgaactatggggggatgggaaagctaagccatcatcttcaaattgagtttcttgagaatgtaagacaccatctgtaagatgaatatagtgcactctatagtcaatgtcatgatctttatgggtttatctgctgaaataactgtgatatacccagctctccatttacaaagttttcctacatattaaactcttgcccgcaattctagaacttcattgtagaacttttcctacataagcatcatttgtcttttctgtagtaaaagttagaaagagctttattttagaacattcgtttttagttttctttgttgttgattactccgccacttttaatacttttatgattcaagtatttgacaaaatcatgtaatttaggtcctctgctgcatgcagtctataccctctctctctctctctctctctctctctctgtggttgtgtcttacttgttgagttactaactccagccattacataaagtaggctggcattatgatgagcaaattactcaagaccacatgttagctcctttttcttttctccttattctgaaaggcaaatataggtccatcttggtgcttctcatgtcataagtaagctgaccccctccttttccagggaataggacaataatccaaaagtgagggttttacatgttgggatttgtgaagtttcttattttacttaatagccgagtcagtgttacaatacatagtaccgtgttacaaaatagtatgtaacaccaagcatgtttatgtgcaaaattgtgcaagactttgttgctggcacgccaagggctgttttaatgtagtttacttattcttttaggtttttcagatgacaatcataaagggaattaggagtgtttttattgtagtcaatccctattgtgctacaacgataaaagaaaaaagcacaagactagaaggagaagtaatgtctaggaaagactcctcacctggggttgctagtcacctacacatcttagaaggcatcaaaccaaagcttattcccctcgactgttttcgggagaaaagaagacaaaattgtttctaacttatactttaccagtttcactacagcatcagaaagaagcaaaatatgctcccacaacacggcgaacctagctttccagatgtgataaaccagaccagcaaaatgattattttcactagagctttgagtctattttttcggtttttccccttcttcctggtaatgtcacgccaccaagccatcatctcaattttttgagatttgacgtaatcgctcaaatagctgagtaagacacttcttgctctaaatactaataaaaaagaggtgaatgtgggtctcagccatgttactcaaatcggataaagtgtctactcttattagggtttttgggtgttggactcatccatttttttttgtaaaatgtcaagattttggtttgaaatgagagattcaagtgtcgtgacatgagtcggcacgcaacacttaaacgtgtcgaagtaacagagggtctcagacaatcaactttaatcaatcacgaaccccaaaatttatgcaacctttgctcatattcagtctctgtaaagcactcaactgcagcacacccacccattcgcttcacctacagcaggagggcacccaagtaattgctatgatgagcgaattattctgttttgccttgctggaatattgctgttagatttgctgactcactggcagttaattatagtcagagaatgagaaatatcctgtagagagagaaagggtatcttttgtatttagctctataaatagctaaggaagggaagggcattgagagtttatgatattataataggagagatttagcctctcgaatgctgataggagcgtagctcttgttggattatcaatactactctgtttgctctatctatttctactcaggttccttcttgtacagtggatccctgattggatttacttcatcaaccagcagataaaattatttgtaggcacattgaaaccattccaaacctaatgaggccaaagtttatcacaaagaatataggagccaaatgtaggcaacagataagagtataattgccagaagttgaagactccaggtattgttcagaaaccttaatgcatatcatcattctgacactagattttccccggagccaactaacaaaaatgaattaaagagattaaggctatgtttagttcacctgaaattttctgatctgaacttatctgatctgatctgaacttattttttctgatctgatctgatctgatctgaaccaatctgattacaagatcttatcttttagatttttctcaatatataagaaaaaatatagtcatgtggggtcttgtttgattcgtctcaatgagtactttattaatattcaattattataatttttactaatatgtaatgaaagatataatgatttttaaatataagcatgatctgaactgatctgatgtgaacttattttttctgatctgatctgatctgattagatctgaaataagcaaaaataaggtgaactgaacatagcctaagcaacaattgagggaaaataagatcattatggctaagataagataaatatgtaatgataaaatcagagtaattatatcagttacactctcaacattcgtcagattgaggtttcctcccaaaatgccaacccacttttctgtattttcacgtccttctctctacccttctaggtatatattacatcagctgtaaaatttttgaaccaactagtagaatactgatctaccctcaactgcctcactttctcattttttctgggcctttttctctctagcacaagtccacataagtgatgcatagcagaaatataattccactagtcatcctcaatattgatataacaaacacatcacccacatattatcatttttaatcgctgcatgcgaggcatacttacccaccaatcaggatatgcataacagcgttcctaattccaaaaccaccatatatcttgggtttgcaactctcatccctagcaacaaggggactttctgaaaaagtggcagattccgcccacaagtagtttgtacggacacctttattatattattaatatcatatttcggcaacacaaattaccagcccagtaaaacatgaattgacatgagactaacaaggggcccaatctaatatcgtacgtctgtactaagcaatgtataaaaaaaagctcaaggtgcattgatgcaatagggatcctaatgtgcataggtgcgcctcattgaagtgaggcaccactaaggataaataaaaaagattgatgtaaaattaaattgtgcaccttgggtgcgcctcgatgaactttttttgtgtgcctaagtgtacctcaagtacgcctcattgatatcgcctcgcctggcagaaaacgagcttgaccccaatcgccttgctccccaccgcctaggcgtgcctcagtcacactttttaaatacattggtattaagtactcagaatggcaaaaagaaactttgggcattaattagacatttcactttttgtgcaactatttgtgacttcagagattgatatgttttctacattacagacttttgtgatggctgcatggtctccactgtcaaagaacattagtttaagtagaagaaatattgctctattaccttcctccctctacaaacaaaatcctaaaatgtggttatgtagtgccaattcaaacttgtagatgcatgactaatgctttcattatgctgtgggtttttatactatgattcatgtccaattacataacaattagctggagtcaggatatgtcacggaaattttaagcctggcaggatgattgtttatattttctctttttcggtgtttaagtcaaagtaaacttctaggctgctcttttataggctagttgggctgttggggagatctacacattaagtgtgaagaaatcttgtctaactccagtttggttgagaactgtaagctgtcataacatttgttgcatgatgaggccttgtgggattatcatgttagctgtaaactctaaacttacttgaaatctagtgttgtgtctccttatttctgtagtcaaaattgaaccttctgtacgtttttgatacctgcgactagaatgatggaattctgaattactgatactattacaaccatctgctaagaacgaagatgactcttagctaatttctcagcagatttagagaaattaagaagaattactaatgaatatttaaagagaaaactaccaagatatgattgtattgatgaaaaacaccaattacaacctaaccaacattcgagaggttggagctctcccaagtaaccatttctctcactaaacttatcaattttcaagatgccttttccattctcagttcctctatatttatactactccccttagcaaactacccaacttattccccaagtaaactaaagagataatatctaaaatacccttccccctacaataatattagttcttagcattaccggccccctaaacttccaccttgtcctcaaggtgggtcgtaatcatcactaaattctgggcctctactcgtatattcagtgtcttgcagcccttcaggccccaagcctaggttatgcagctcgtgttgcggctcctcctcatatagttctctggctggagtgagtgcctcaactataatgaaaaagtcctggaggtggggaaggaaggagtgtctgaaatggtgtggtgtgctgctggtgttatgggcttgtgcctgaaagttttgggtttaaagagatggagtggagaagagtggagaagtgactggagacgtaaaagaaggaatcataatttttgtaagtggtgggttgaaaaagttggtgggaagaattgtttttataaaatgtagtgtaatggtcgaaaaatgggtggagtaagtatggtttttggctggggatgtggtactgggttgaaaataaataggtctgagcttacttgtaaaattggcctcaacatgagcaggcccaatatcttgagccaattccccaaaagctggcaatagagcactcttaattgcattgttgtgggccatcgggctccaaacatatattcggaggagccggacttctttggtgatgtcattagcttggcccattgcacactttcccttaacagcctcaagatcttttcccacttttgtaccccaaccacgtggcttcaccatcctttctttcttgcttttgtcacttttttggcaatatacgagtttgtccttactaccctcatcttctaatgttggcttcctcaccaagcttaatttctggaattttgtccaccaaatcccaccacccatcgtcaacaccatacctatctacaccggccaagaagcctggtcctccacccgaattttcgccacagacaaagcctgaacaaccgtcagttctctcaccggagaagttcacaggtccaccacctgacccactagttgctgatccacccttcacaaatctccctcctctggctgccacaagtagtggttcctccgtaatactcatatttctcgtccaagagccctggaccaccaccggacccacttccaccggcaccaacttgttcaaatgatacttctctttcttttccaaacagcctacttggactggaaaaaccactgcgattgtagcctccgccagatctgtagcctagtgcacctaacgtgcttccaactgcaacccaatagggatggaaatggatgggattcggggagggtggagcatcacccgcatccgtcacccgcatccattcgctccacccgctccacccgcatccatccatccgtcacccacgggtgaaacgggtgggtcggtgataaacgggtggaaccatttagggggtgtttggtatcatgtttttttacaaaagaaacagaatcaagtaacaaaatccgtttctacttgtttggttctatgttgctcagactcgagtacccatgtccgacacgggtacgtgtccaagtgtccaactcagctattttctagaattttttatattttttaacccaaaacaaagtgtccaagtgtcccacccatgtccgactcccgaggatccgacacgggtacttgaggtgaaatgaagagtccgagcaacggaggtttggttagtgtgtaaagtaacaattaccgttacttgaggaaaacacatccccccaagttgtttccattcaaaaacctaaggaaacaaataacgtttcactcctcaaacaagaggaaagggaatgggttatatttatttccattccattaggataccaaacaactaataagggtaacacttattattatcctttcccctccttatcaaaatcctttccattccgtttacggtattcataccaaacacccccttagtatattttctaatgaaatttgtgatatgatatgcatgatataaaataattctatcaaaaatataaaaagtaagtaaacttacatgtacaacttaatagatgggtgatgggttggaggttaaacgagtgatggatcgggtgacgggtgaagaaattctcacccaccactcgctttccatccatttaaattaggtttttcatccatttaaaaaaccgggttaaacaggtgatgtatgatccatcacccatttccatcctcaaacacatcccgatttgtttactgcaccaccagatccaccagtataaccacccgaaaaatcatcatgccttctactagccttgtaacctgctcccggtgagaagcttcttccacaagtggtggtcgctggacctccatctccttcttccccaaaaaattttccatgacacccactcgacccttcatctgtgacaacctcttcttcgtccacctctgaagttttggggtcgtcttcctcctcaagctcctcttgaagtaactttaacttccgttggatgggagagaacgcttcattgattatcttcaccagatcttcttgaagtttctcgaaactttttctcacgttttcctctacctctttcgtgatttcctttccgatctccttcatttttagactaggagctcttgcgattccatggcagatttctttttttaaaacaagaaaatcaggcacttaatctcccagaatagtggtgctctgataccattttctaagaaccaagatgactcttagctaatttctcagcataacaacaaatttagagaaattaagaagaattactaatgaatatttaaagagaaaactactaagatatgattgtattgatgaaaaacaccgattacaacctaaccaagaggttggagctctcccaagtaaccatttctctcactaaacttatcaattttcaagatgccgtttactactccccttagcaaactacccaacttattccccaataaactaaagagataatatctaaaatacccttccccctacaatattagttcttagcaccatcaaactgggatggatggttttgtaaggttccaatttacttctccatcaaaatattttaggattttttatctcatgtattttagagtttcctcgtccctttttatctgataagattcttctgatgatttgattttatggtaggctccaatcagcaatattaaagaactgaagattctgaaagctggagttccattttcacttgacttcattccagaggtttgtatttttatagtggttagacatgcttcccctagttttcaaagtaaaagcatccttgttgtgacgatattttttcccttgtttttgtttttattattatcatcacttatttccattttctattttccatgctgataagatgttcatcaccataatcttgtggtatcagaagtgtttagtggagtttattcactacacatgcagttgttcttttgccatgaccgccattcattttctcgtcaaaacaaatctatgaagtttggttttcagactcatggttcttgtagctcttgtgaatttttttttcttctccttgcatgcattcttcaaattacatattgcatataccaggtgctctcctttattttatatttaatttttaaaattctatcatatattttttaatgtcaaacctcaaactaggggttcactgcatcttaggcttaccaggctaatatttctttacttaaccttttccctttatatttgctatcctcttgtgtagtaatcaccataagaagggtacaaactaaattaccctcccattcttttgtatcattctgaaatagtgtcacagagctttgatttttttgccctcatttaatctggcaaatgttctctctatttttttttttttactttcttttgacgggattctcaggcaattgttacggggagcagccagtcacactgtttctgtttattatgcaggtgagttacctgcccctctctgttatgattactgcgtttaagaagaccagcgttacaagacctcttgagggcttcggagttcttatcccttcgaatgagcaacataatggactgaagactctcggtaattgtctggttcacgtgtgtagcgaatcagattttcaaaccctgatttcgtaacattgcaggtactctgttttcatctatgatgtttccagatcgtgctttctccgatatgtatctctatactacctttgttggaggaagcagaaatagagaacttgcaaaagcttcaacgtatgagatatgcaatgttttaaatgtatgctatagtcatcgtttcaaccttttggtgcctttttcttactaatttatcctcctggtttaatgatcttagggatgaattggagcaaatagtttcgtctgatctccaccagctgttgggcactgagggaaaacctacttttgtgaagtattgatatctttcacccaacttaacatgatttgtgcttataatatgttaaataaagtaactgaaatcctgaaattaagactacgaaactgtatggtgacagtcatttttactggaacaatgcattccctttatatgggcacaattacgactcagttctgagagcaatagaaaagatggaaagagatcttcctggacttttttacgcaggtaatctgtcatttgcttgttgcgataaagttcatgtacagttggcatatcaatcaacttgcattctttcttgctaactccaaacaatcaggatcattaacttgtaggctgcagcaacagagagtatctcccaagttgttaggtttcatgtaacctcgtcgctgagatgaaatttccgttggctaaaaagtgaaagttttgtattgatgttacccaaaacaaaagtattttgcatgttgcttgaagttttggttgtttcagatagtacatcctttgacatgaaaataaatggaaaagcgtatgtcaagcaattatcatctagtttctttgtttctagatactagccgcatttgatcccagatcatttttgaggaagtcagctgaaataccgtagctatccttcagttttcataataaaactttaatggatctgatgtacagtaatttagtgtgcaccgggttaataattgatattaacttcatatagtgagtcttataaagatataatgaacttatatacaatatagtggattttattaatggaaaacatatagtgaaactatatgcaatatagtatgatacataaagacttagacaacaagagcattcgaaattacaaagaacaaaggaaagaacaattgtatcaaaccggttcgaatgaacaaacaaccaccacttccacaatcaatgtaccaccaatcaagactaaactataacaatgagcttctagtttaagtctactttgagttttaatcaccaattcaacgattagatgatcaaaattgcaaaggttaagagttggtcaaacctaaccaagagttacactaggcacatagctttgttaggagtatattagtttatgaattctagttaagttagaaatccaatacctagttggattaggattcctaattggattagaattatagtttagttagaattctagtaatagtaggcgtgtgattaggagatataattagcttaattcttatattgttagtttaattcttatcctcgttttaggtttatctttagtcgaacttgtaccctatataaggggcctttatttcattaataatatagtttattttgagtttaaacctttacttgtgattgtttgcttgagaggttattaatcgaaccattaataacttttcaggattgttaagtttttagtgttaaacatcttaatttcaggagtgattttaagagtgtttagattcttgtattcaagtttcaggactgatcttgaatcaagaaatatccctagtttcgactaatatcataagtagttcgaattcttggagtcttttcttcaagattcatattcataacttgattatttagacttcttggttttgtaatcatatcaagtggtatcagttttccagggaggagaggatacaaagggttctctttgatcaaagaagatccaagggcatcaataagaatgacacttgcaataagttcgagtgatacaaacaacttcaagactcgatcttttgctaccaagaaccaatcttgacgcctgaagattgttaggacaaaggataagaagtgtttctacatccaagattgcattctttacgtccaagattgcgtcaagatccattctttaagttcaagaaaggagtagaaagcattcgaacactacttaaacatgacatccgagatggataagctggctatggccatgagtgccttggcacaatcacaaactgagtcacgcaaccacatgggtaggatggaggcacgtgaccgtggattgaaactagatgactatagtggagatggcaatccagaagacttgttggagtggatttgccaactaggcaaagtgagtgattataggggctttgatcacaagaagagattcaaggttgcttccattaggctcacgaagtatgctggaatacggctcgaaggattgcatgcacaaacttcttgcctaatgactatgaacaaaaacagttcataaggctcgcatcaataagccaaaacacacttagtgtacacgaatacagcatggagtttgacaaattagggcttatatgtgacatagaagagaaagagcaatacaagattgcaatgtacattaaagggttgaatcgatatatagccaagaagatcgaagtctcaacttatcacttctttgaggatgtgactaaattggctaagaaattcgaagagcatgacaaagaagaagggcctaagagttcttacacacctaagtatgactctagtgctaaagggaaatcaacagttccctactcaaggtggtcggaaagacctaagaaccccactacacctaaggaggacactagcatggagaagacaaaagtggccgtacctaaggagagtttaattttgtgttttatacatctttgcttaagagcttaacaattgaaactattaataacttttcaggatggttaagtttttagtgttaaacatcttaatttcaggagtgattttaagagtatttagattcttgtattcaagtttcaggagtgatcttgaatcaagaaatatccccttgttcaactattataattgatcttattcgagttcttggagttaatttcttcaagattcatattcatacttgattattagacttcttggtttagtaatcatatcaatatcattagcattaatttacccccagggagattaagaaaggattagcctaatcaaggcgcttaagaagtttttaggaaaaatcgtgcttgttaagcttaagaattgaacttctttcaccatttgcccttgattctcttgttgaactagaagatcttggttcatagtagatgctcctgcatcatagtagagcatttaattttaattttttaacatgcacgaagatgtaggtagtgtagtatatatcgtgagacgtggtttaacatatagaaagatgtagtttctgcatgatatagtgagtttttgcatgatatagtgaatgtctgaatgatacagtggatcgttccgaattgttgtagtttgtatgatatagtatttttgtgaatgatatagtgagtttcttcatgatacaatgggtttctgaatgatatagtggattgcttagaaatgatatagtgagcttttgtatcatgtagtaggtttctatgtgatataggttgttaaaagatgatacatgcttttggcctcatgtactctaatgttaacgtgaacccggtccttgcaagtcaattgcagttttttcaatattaagctatttttttttttttttttttttttttttttttttttttgtacgggaatatttagcatctttaccacaaacataaccatacgaatattatgcggaaattccagtctgaagtcttaacttttcaaaattaaaagcttctatattatttttggaatgaaaaaaaatgagctatggcatgttattttgaaatacaatgagtctcaaggtgcatagtggcttcaattctacgaataatgaatggactactgatttctaattttttgttccgggcttttgcattaggtaaccataaagatggactctctgtgggaagaactatttcctctggatacaaagctgcggagcttgtgatatcctatctcaactctacttaagatgcctaaatgatcgaggagactccgtaagtcctttctctgattctatctttgaactgagtggaaacacgactgtggtctaaagtagttgatgtctcagatatccagaaatggcgttagtgatattcaggagctgtccattgaccctttgattcattgttgcagtttactgaaagttgttagctggtctcagaaaaacgaaaggaaaaaagggggaaaacaaaaacaaagaaacgtagattgtggtgttaaaatcaagaattccagagatttgtaccttctttatcagttgaattgtttacagtgtgaatcaagaagttagctcgaccttcttttcttgtgaatggtaagatttcgtgatcatcaatacttgattgtgctgtttgcaacttcaacggtaagatttcctgatcttacagtttaattgcttgtgctgtttgccactt

SEQ ID NO: 8 - DNA, 1575 bp, synthetic construct
  misc_feature 1..1575: note = R126A mutated Beta vulgaris PPO2
  variation 378: note = n is any nucleotide
  source 1..1575: mol_type = other DNA
atggtaatgctatacgattctcacctctcaggagtctcaactcatcttcaactatcgcaggcatttcccaggaagaacccattaatggccaaagtgtctgagccgggtaaacccacttctgctaaaaggattgctgttgttggtgctggtgttagtggacttgctgccgcatataagctaaagtcccatggcttgagtgtgacattgtttgaagctgatactagagctggaggaaaactcaaaactgttgcaaaggatggtttgatttgggatgagggggcaaatactatgatagagagtgaagcggaggtcacgagtttactcgatgatcttgggcttcgtgagaagcagcagtttccaattgcacaaaacaaagcntacattgcgagagacggtcgtcctgtgctgataccttcgagtcccattgcacttctcaagagcaatatcctttcagcgcaatctaagctacaacttatgttggagccattcctttggagaaaacgctatgcttctaagatttctgatgagcatgctcaggaaagtgtgggtgagttttttgagcgacattttgggaaagagtttgttgattatctaattgatccttttgtcgcgggtacaagtggaggagatcctcagtctctttctatgcgtcatgcatttccagaagtatggaatattgagaacaagtttggctcactaatttccggattaattcaatctaaactgtctccaaagaaggaaaagggtggaggaggaaagccttcttctaatgaaaagacacgcatacgtggttcgttttctttccagggtggaatgcagacacttgttgacacaatatgcaatcagtttggtaaagatgaactcaaactacagtgcaaggtcctttcattgtcctacagtcataaggggatcccttcttcagaaaattgggtcgtgtcttctgtgtcaaaaaattccattgaagatcaacaatatgatgctgtcatcgttaccgctccaatcagcaatattaaagaactgaagattctgaaagctggagttccattttcacttgacttcattccagaggtgagttacctgcccctctctgttatgattactgcgtttaagaagaccagcgttacaagacctcttgagggcttcggagttcttatcccttcgaatgagcaacataatggactgaagactctcggtactctgttttcatctatgatgtttccagatcgtgctttctccgatatgtatctctatactacctttgttggaggaagcagaaatagagaacttgcaaaagcttcaacggatgaattggagcaaatagtttcgtctgatctccaccagctgttgggcactgagggaaaacctacttttgtgaatcatttttactggaacaatgcattccctttatatgggcacaattacgactcagttctgagagcaatagaaaagatggaaagagatcttcctggacttttttacgcaggtaaccataaagatggactctctgtgggaagaactatttcctctggatacaaagctgcggagcttgtgatatcctatctcaactctacttaa

SEQ ID NO: 9 - protein, 524 aa, synthetic construct
  REGION 1..524: note = R126A mutant protein of Beta vulgaris PPO2
MVMLYDSHLSGVSTHLQLSQAFPRKNPLMAKVSEPGKPTSAKRIAVVGAGVSGLAAAYKLKSHGLSVTLFEADTRAGGKLKTVAKDGLIWDEGANTMIESEAEVTSLLDDLGLREKQQFPIAQNKAYIARDGRPVLIPSSPIALLKSNILSAQSKLQLMLEPFLWRKRYASKISDEHAQESVGEFFERHFGKEFVDYLIDPFVAGTSGGDPQSLSMRHAFPEVWNIENKFGSLISGLIQSKLSPKKEKGGGGKPSSNEKTRIRGSFSFQGGMQTLVDTICNQFGKDELKLQCKVLSLSYSHKGIPSSENWVVSSVSKNSIEDQQYDAVIVTAPISNIKELKILKAGVPFSLDFIPEVSYLPLSVMITAFKKTSVTRPLEGFGVLIPSNEQHNGLKTLGTLFSSMMFPDRAFSDMYLYTTFVGGSRNRELAKASTDELEQIVSSDLHQLLGTEGKPTFVNHFYWNNAFPLYGHNYDSVLRAIEKMERDLPGLFYAGNHKDGLSVGRTISSGYKAAELVISYLNST

SEQ ID NO: 10 - DNA, 37009 bp, synthetic construct
  misc_feature 1..37009: note = R126G mutated Beta vulgaris PPO2
  variation 3684: note = n is any nucleotide
  source 1..37009: mol_type = other DNA
tattccatcgaatgtagcaaattgactgtccgttgcaatttcggagtttccactcgtcgcatggtaaatggtaatgctatacgattctcacctctcaggagtctcaactcatcttcaactatcgcaggcatttcccaggaagaacccattaatggccaaagtgtctgagccgggtaaacccagtaagtcaaacattcgaatcacaactcaagcaaatttgtcttgtttgcgttatattttgctcatttcagccttttttgtttttccgacctttgcatactgaatattgtgtgtgtgtgtgtgtggggtttcagcttctgctaaaaggattgctgttgttggtgctggtgttaggtaaattttcgtctcttgcagagtttttgagtcatttgggaattctatgtgaaacttgtaactcccttcagtccaacgaacgcagtacaattttctatcaaatcatggtcctaatttccaattttccatatatattgttggaattatattgggattgtctatcactattaatagtattaggatcaattgtagagaagcacagaaatttttgggatcgaaagaatatctggattgccacattaacagcagatataattcttccaattggtttttggttcttcctaccttgacttgtctggtcaaacattataaactttaacctttaatatccattaaagtaaactataggatttttttgtctaaaacatgcttatataacatgaaatttgtgagaaaccaccttatatatatttttttgcgaaaacaaaccttaaacaaaattattatcgtgagaacaaaccttatgccaatttcgatcattgacccaaggttttggcattgaccgtgtcatgaattttgttgggtttaaaaagtcatgtgtcttgcatacgaaatggtaaatgcgggaaccttgggtcaatgtttggaatccgcataaggtttgttctcccaaaaaatgtttttgttcaaggtttgtttttgcaaaaaaacttatataaggtgctttctcagaaatttcatgttttataaagtagtatttgacaaaaaaccctaaaatatattatagaattattattgactaaattgtgtaaaaatgtactcttctaaaagtacattatagtattttagtggaacatttgcgagaaactactttataaatacgatttttgcgagaaatttcctaataaaaaaatgtgaagtgcaaaactatcttattgataattttctactccctcaaatccaaaatactatgaagtctttcctttctggtttgtcccagattagtttgtacgcttccatctttggtatgatcccacttttattatacttattagttttacgtgagttccttactctatctcttttaacaaaaatactcaactatctctatccaataaaaagttccttactagtcctatcacatctgctttttaataaaataacgtttgataaccacacaacttatatccttaaaatacacgttcaaccaagtgttgagattaatttggacggagggaataaatattttttgaggcatattggtagcagtattcggattccgataggttgactatgtttccaatgttgaccaacacttgccttgcatgtaattctaactttgctcttttttattcttcatttccctcgtattccatatacaatgtttagagacccattccttcctcttctcttctttcccttccttactatgctttgccataatcttcctcaaatgagtgcaaattaatttgtcgttgatgtaggccaactgattgtagcacatcttcatagttcatacctcaacacactcgtaattatattataccctacatgttaaatggctcatgaagctttattttatatcatacttcctccgtttcacaataagtgtaacacttttcttatttggaataatcacaataagtgaaaccaagctccaaatggtaagaaaagttcactcttattacaaatataccaccaaaaagtaagaggggatcacaacttcaatacttcttcactctactttattgtggtcccaactttctctctctaaattccttggtaactccccactttctctatgtttcacttatggtgaaatggaggaagtattttgtagtggtatttagctactaggccttggatgatatacaatcatacaatgtatttatattcacgataatttgctgcccaccttgattaccatgatttccaccaattttatcaatttcagtacttcaccaccccgaatttatattttttatttccaaccttggtatctccatttgtctgagtgcccgatccatttgtatcgcctccagaattgaagaagcttcctgcagctagacaattaggaaggttaaaaaagtttggagatggtggaggatagccataataatcattgttgggaggtggaacttggaaggttattgtagggttgaagtccttgatgaagaagaattgagttcaaatgagaggaaaaaggagcagggaagagggacaataagaaaaaaaagggtaaactaaaatcacgtgtaaggcatgtgcagatcaacatcagaaagcatagtcaacctactggtattagggcactgatacctttttgggtcaaaatttttttacaaggtatttcatgaggtagttttgtccatttttttttttacaaggtatcgtctcattttttttttatcatttagtttctcgcaataagtgtatttcatgaggtagttttttccaaaatttcctcatttattataaaatacctcatcttttccataaataatgcaatgtctagacttttacgctgtttacacatgctcctttgaccatctattgacacacaaggaaaaatagagtagagtcatgcaggatcttgttagatttttctcgatatatactttcaaaagatcaatttttttataattttttttttgaggggattttttttttataattatgtacttatcaaaggtcaaagttgtgcaccgggaagcataaaactctatgtgttgcaatttacatggaaggggaggagtataataagagaaaattatggtaaaaggttcattcctggagatcatgagaaaggaagtagaaagaacaaaaaagaacaatgggagtgcttttcaatgtttgttgtacgtagcatttattcatttgctataatgttttgtgacattgtagtggacttgctgccgcatataagctaaagtcccatggcttgagtgtgacattgtttgaagctgatactagagctggaggaaaactcaaaactgttgcaaaggatggtttgatttgggatgagggggcaaatactatggtaatgtttttgattattgcaggtcttgcactttagcgcacaattaatttctggatttttttttgtactgtggtggttatggtcatcaacatgtctcacccactgtgcttgcagatagagagtgaagcggaggtcacgagtttactcgatgatcttgggcttcgtgagaagcagcagtttgtaagtctttcattatctgaatggcacatactttatttcgaaagattgtaattgccttttctttctagatggcttcatcttcatgttgctttctgattcagtttcgtggctaactttccaagtttgtctgattgctaactctgtcatagccaattgcacaaaacaaaggntacattgcgagagacggtcgtcctgtgctggtaagtttgcttgttttacttttgacctcttttaagatctttcaactctggagcctggaaacatggtgatgcaggaggcaagttctctctattttacatcctttcttctctgtatcttatgacatttgcctcttattctgtgcagataccttcgagtcccattgcacttctcaagagcaatatcctttcagcgcaatctaaggtcgttttatgttaagacatacttgatgctgagagtttattgaattcttaaccttcttcttattttttttttatttttttagcaaaaggtaagtatattgcatttaccaaaaaacagtatgtacaccaccacagcagccatgtcagaatctagaaataccaccgaaaaaatcctacacccaaccagagacagttatattatatcctactcctaagtttctgtacccaatttacatcaatattggtccatttacaagatatttttataattcacagaagcacatcagttttaattagtttaataatgacctctggatgaataaccaactcagaccatatagccttattcctggctttccggaagttgtacgccagagcagcaagcacagcaatgcaaacctgtttcttatacctccttttatgtgtcttagcccatctcttatagctagtgaagatacagtcgtgtgcacaggattgaaccccaatccaactagcgaaagcctcacaacattatgactataaatacatctgaagtataaatgctgcacctttttctcctcttgcctgcacggtatcagaacaaatcccagctttagctaacaattccctggttttcagtttattcaatgccatcatgcaagcaatgaaagaatgttttggaacattcagtttgttccaaacacagtgagagcaagggacctttcctgcagttccacttagccacttatatccctgactaatagtatgactctttgcaccgtaaattgatttcaacttaactttttcataagcagtgaattgtgtgttgttagagtgtctagctgtctaggagattgggagaaaaggagggaccaaggagatagaaacacacctttgtgtttctttgtgtatttactttttagggtgggtcacgttttctgagaaatttgggaaaaggaagaaatagtaacacactttcccatttgtataacctgtatactggagctccaatataatttgcatttttttttgagctgcaagaatatgttgacaaacagttattgcttcttcctcagctacaacttatgttggagccattcctttggagaaaacgctatgcttctaagatttctgatgagcatgctcaggaaaggtaatgtcaagacatgtgttacctcgccttaattttcgttccaggaggtgagcatgcatttagaactaaaaggcacaaagactgttggtggtcttgcctgttcaaatataatggagaggagttttcgctacatttaccctctcttgaagtggggttgaaatatagcatcaagttgaatgcttgattaagtttaaaggacttgtgtaactctttttctgtttactgtgattacatgacctggttgattaacataatggtctgtttatctgtagtgtgggtgagttttttgagcgacattttgggaaagaggtaatggtttaccatagtatttctgctttagtggtaaattgtaatgttgctgataattatacttcgctgcagtttgttgattatctaattgatccttttgtcgcgggtacaagtggaggagatcctcagtctctttctgtaagtgaacattttgtgcttcactcccaattttttggaggctggaaatagattcttttccagttgttctgtcaaaaatagatgtagctttattttgaatttgaagttcccaattgttcattttgactattactgattattgctaagagtggcattatgctattatgctcctaaaagaaaggtgaattttgacctacatatagtataatgtatcaatattggtttaattgtttgttcttttgttccttttggtgctcatcttgcgccttgttctcatcgctcgttttttcatgttgcacttgatttaaatttgctcagcttaacttgtctttttgaatttatattacttattgctatattttactaatttcgttgaaactaattttttgctgaacttttcgttttgttgaaatcatttttctgaattaacttgattttcctgaatagaattgaattttggtgatcttaccttttctgcagccttttatttctttcttgtcctttttccaatctcatttttttatatttccattgtgttgacatcttatcattaactgtgcagatgcgtcatgcatttccagaagtatggaatattgagaacaagtatggaccataagacgtttattttaatcgacatgtatgtttcttagtttatacatatattaattctgtggtaaaaaaaccgaacaagaatatctttttttttttctatcatcaaaaagggtgaatatatgtagaggaaaaagatttgaatcaagatattagcctaaagcaataataatgttagtaatagctttaataacaaattcaaaacgtacattaatgaaccgagaggccggaaaatagttaaagtgaccactaagagaagcgaaggattcatgatgggttttcaacccagtagggcaaatttgttcaatgttctttacaaatcaagcttattaccttgtgggtgtttttgctagagatgaatgatagaattttccctagttggaagtcttttttggttactttatgggagctagtgatgtaatttgtttcgccttatggcatttcctaacatgtgcttttgtgatgtattgaagctttttttttgccttaatttatgctggattttaattttgttctttgtttcatttttcttgcttttgaaaaaaatatatagatatgtatatattaggattggtcgaggattttgagggaagggaaagacctaagaaaacttggatgagggtgattgatagtgatatgagtctatttgggatcgaagaaaatattcctttggataaggtgtagtggagggttgagggagcaaatttatgcagattagcttgacttaaagtttttctttttgattatttttcatttacttgtgttttgcaaacatttactcatgaatgatgtaaacttcttcaaccaaatctctggaaaaaaataatctacatggaaaaaacattattaatgttaacttgacagagatcccatccttgtgaagcagctagcaattaggcatctaacaattgacattttaatggacaggatagaatgtctcttgatagtcaataccctctgtttcattgtatcccatagctactaatctagtttgtatctttccaaagaaccattattttgaagtttcaccttgaacacccattttgaaccaatatgtttcttgcccttggggagaggggctaattgccatgttttgatgcggatgcaaagacacttgttctacctgagcctattgacttgatcatggatactctagggtttgaactcaagggaaagaatcaagtcttggcatgtgtggtgacatggcgtggggatggagtaaagaagagtcatagttctgttaggatatgttcttgcttgctacatagaatcgtagttctgttaggattgctatgatattatatctagtagatagattttatagttaattaggataaacatgtgatgatcatgttataataggcatgtgattagaggataggattagcttaattcttatcttgttgttagtttaattcttatcctagttttatgtttatcttagtcgaagttgtagccatataaagggcgttccattcattaataatacttagttttgctttgtgttttaaacatacttcttgattattgtttgcttgtgagctaactaatcaaaccattaaagacttttcaggagttttagtgctaaacatcttaatttcaggagtgattttaagagcgtttagtgatcttgaatcaagaaatatccttgttcttgttcgactaatatcagtggttttgttcgagttcttggagttaatctcttcaagattcttattcaacttgattgttgagcttattggtttagtaatcatatcaagtggtatcagttttccagggaggagaggatagataggattctctttgatcaacaaagatccaagggctatcaacaaggttcaaacattgctgcttgttcaagacttgatctttttctaccaagatgcattctttacgtcacaaggtagtaataacaagattaagagtggtttttacatccaagaatcaatctttcacgtccaagatttcatctttcacgtctaagattcattctttaagatcaagaaagttataacaagcatagaagaacacataaccatggagtccgagatggacaagcttgccaaagctatgcaagcacttgcaaagtcgcaaactgaatcacagagtcgactcaatgagaatactaccacaatcaatgggattggtagtaacatgaataggttggaggcacgcatggatgccattgcaaccatcatacaaaagaagcttgatcggaatagtgccaacttcataggtgccaattcagaggaagagttggcagaacgtgaagaaagatcatccaagactacatacaatgatgatcgtggcttaaagttggatgactataatggagatagcaatcgagaagacttgttacagtggattcgacaacttgagaaggtatgtgattatagaggctttgatgacaagaaaagattcaggattgcctccataagactcacgaaatatgctggaatttggcttgaaagcttcaaggcacaacgagccaagaaaggtaaagaaaagttgtgtagttggacaaagttgaaagttcaagcttaaagagaagttcttgcctagtgactatgaacaaaaatagttcataagactctctactataagccaagacacgcttagtgtacatgagtacaccatggaatttgacaagctagggcttatatttgacatagaggagaaagaacaatggaagattgcaagatacatcaaaggcttgaaccgccacattgccaagaaggtggaagtatccacttatcacacctttgaggatgtgacaaagttggctaagaagtttgaagaacatgagaaggaagagaagcctaagagttcttacacgcctaagtatgatactaatgctaaggccaaggctagcttcctactcaaagtggtatgaaggacctaagaggctaagaacctcaccccacctaaagaagacacaagagttgagaagcctaaagtcgtcgttccaaaggagaaatttgaagagatgagaaagtgcttcaagtgtcaaggaaggagacacatagcaagcaattgtcctaacaaaagagtcctcaccatgagacaatacctagctttgcaagaagaggaggatgtctattagttcgtccctgatgaagagcaaacttaggggaagaagaggaggaggatgcttttgctgaggatgatgcaaggctagtaggggtcaagaggcgcaccttacatgtcgaccatacacctagcatggagcaaatggaaaaatcttttccacactagatgcaaggtaggtgactatatatgtaatggtataatagatagtggttcttgcactaatgttattgtatctgaggtagtgtcaaagctaaacttagctacaagggcacaccctaagccatacaagttgagtttgctagatgatagcactggcatgagagtaaagaaacaagctttgatttcattctctataggggttataaggatgagttatggggtgatgtattgcctatgagtgcatgtcatctcttgcttggaagaccattgcagtttgataaaaaggtcatccatgagggggactctaatgtgtactctgtgttggttggttctaagagggtatgtttgcatcccttagctcctcattcagtggcgccaaagcaaccacctaagacaccaagttactttctatcttcaagggagttcgaacaagaggtggaggaagaaggttgtgcttatgccttgattgtaagacatgctgccacaagtgtcaagactactagcaatgagaagctcgaagccttgatgaaagagtttgaggatgtctttctagaggaactacgacccttgagaggcatagaacatgctgtagaccttgtacctggcgcccctttgcctaacaagcctgcttataagtgtgatccagtggcatctagggaattgcaacgccaaattgaggacctaattgaaaagggctatttaagggagatcatgagtccatgtgttgtgccagctttactagttcctaagaaagatgacacatggaggatgtgcatagatagtagagcagtgaacaacattacagtcaagtaaaggtttcctatgcctagattggaagatatgttggataagttacatggggcatcaatcttttctaagattgatcttcgaagtggctaccaccaaatgaggatcagagaaggtgatgagtggaaaacaacattcaagaccaagcagggattgtatgagtggatggtgatgccatttgccttatgcaatgcgccaagctctttcatgagcttgatgaatgaggtacttcgtccgttccttaacaagtttgtggttgtttacatagatgatatacatatctatagccaaaatgtggaggaacacttgttgaacttgcgtagcttattcatgaagcttagagagcaccaactctatggtaagattgatggcgacgaggttgacgggggattatggcggcagtgaatcaccctctttgccggtcactgaaatacaacctgaggtatctttaaattctgtaattggattgactaacccaaaaactatgaaattgctgggaaaaattgctggatgtgaagttgtggtgatgattgaccctggggcaacccataattttttatcactagctactgttgagaaattagctattcctgtgtcggaatcggaaggatttggggtttctctaggggatggacaggcggtgaggggtagtggaatttgtagaggggtgttattgagtttaaatggtggagttgaagtggaaacagattttcagcctctgggtcttggtaattcggacgtgattttgggtgtacagtggctggagacgttggggacagtggagagcaattggaaaacacaaacaatggggtttgaaatcgagggtgtcaagttcactttgaaggtgacccatcactggcgaggtctcgaatctcactcaaagccatgatacgtaccttatgtaaagagggtggaggtttgtggcttgagttgaaccagattgagcattatcaggagaaaacaccgcattcatcagccttacctgaaattccagttttcttacagagagtccttacccaatttcagtctgtgtttgctacaccagaaggcttaccaccgataagagaacatgaacatgcaatagttcttagagaagggtgtaatccggtaggggtaataccgtaccgttatccacagttccaaaaagatgagatagagcgcctcatcaaagaaatgttggcttccggaatcatcaatccttccacgagccctttctcgagcccggtgatattagtgaagaagaaagatgggtcgtggcggttttgtgtagactatcgggccctcaataaagaaacggtccccgataagtatcccattcccgtgattgatgaattgttggatgagcttcatggggcaacacttttttcaaaactcgacttaagggccgggtatcaccagatccgggttaaggccgaagacactctcaaaacagcttttcgcactcatgaggggcattacgagtttttagtaatgccatttgggttgacaaacgcgccggcaacgtttcaatcccttatgaacgaggtcttcaaaccattcttgcgcaagtttgtcttggtatttttcgacgatatattggtctacagtagttctgccaggaacatgaggagcatttgaccttggtgttgcacaccctagcagctcataaattgtttgtgaatcagaagaaatgtgattttggcaggtcggaagtagcatatatggggcatatcatctctggtcaaggggtggctgtggatatggagaaggttcaagcgatggtggaatggccccttcctaaaaacctccgggaattacggggatttttgggccttacagggtactaccgcaaattcgtacttcactatgctcatatagccaagcctttaactgatcaactcaagagagatgcgtttgggtggtctgaggcagcaactcaagcctttgaaaagctcaagaaggcgatgatcacatcccctgttttggcaatgccggacttccaagagttgtttgtggttgagaccgacgcatccgggtatggtctgggggcagtgttaatgcaaaacaaccgacccattgccttttacagtaagttgttaggtgcccgggctcaattaaagtcgatctacgaaatggagttgatggccatctgcatggcagttcagaattggagatattatctgctgggtcgacatttcctcattcgtacagaccaacagagtttacgtcatctcactcagcagcgagaagtaagtactgccttccaacgttggatgagtaaacttatggggttcgattttgaaatacagtttaagccggggtgtgccaaccgggtagctgatgcattatcccgcaagacagtgggagaggttgaattgggtgcgctgatattaactcatggggtggactggaccgacttggagcgtgaaattgaaggcgatcctctgttgtgcaaaattaaacaagacttccacgggggtgctattactcctgtgcacttttctttggtggacaacaagctgttgttcaagggtcgatacgtgattcccagctcttcggtttttattcctaccttgctgcgagaatatcacgattctcccattggagggcattcgggggacctcaaaacatatctcaggatggctgccgactggtattggaggggcatgcgcaaggatgtggcgcggtatgtgcaacattgtagcgtgtgtcaacaacaaaaaatgtctcaacagatgccagggggggtactacaaccactccccataccttcctcggtttgggatgacttgtcaatggacttcgtggaaggcttgccatcttccaagggggtaaacaccatcctcgtggtggtcgatcgtttgtctaagtacgcccacttcctcccactacgtcatccatttactgctgtgtcggtggcaaatgtgtttgtcaaagaggtggttcgtttgcatgggtttccttcctccattgtttcagatcgggatcgaatttttatgagtgtgttttggcgggaattatttcgtttacatgacaccacactcaaacgaagtaccgcgtatcatcctcaaacggatggtcagtccgaaatcgtcaatcgagctctggagacttatttgcgttgctttgtgggggaatacccgcgctcttgggctcagtggcttgggccgaattttcatataatacttctcctcatctctctaccaaaatgaccccgtcaaggtcctttatggtagagaccctcctactgtgatacgggttaatcggggagcctcacctgttgaaagcttggaaaacatgctccaagagcgagacgcagtattagatgccttgcagattaatctgattaaagctcaacagaaaatgaagagtagtgctgatgctacaagaagagaggtgcattttaaggtgggagatcgagtgtacttaaaattacagccttaccgtcagaaatctttggcttaacgcccttatgagaagttagccgcccgtttctacggaccatttactattttacagaagattgggcaagctgcatacaagttacaacttcctgtttctagcaaggtgcatccggtgtttcatgtctcccaactgaaacaggccgttggttccattcccgtttcagccactattccagagcaattgtcttctgacttggagttagaggtggaacctgatgaactcctcgatgttcgtagtgtttctagaggccagcacacttacttggaagctctcattcagtggcagggattaccatcattcgaagctacctgggaagatgtggctgctttccatcaccattttccatccttccaccttgaggacaaggtgaaactttgggggggtggtaatgtgatgcaccaaactaccactccactactcacctattagaggcgtaagaaaaagggggtaaatcaggaatagtttacaaattctgttgaaaggaatattttgtaattatgatgtcagaggttgttagcaaaaaggcagtagagtaacaataaaaaggggaagggaggagagaagaaggtattgagatttttgtaaggaacttggcccttgggagagttgggagcctctcgaaagctcaccattatcttgtgaatattttccttcctggttatatacaagaaccttcctctgtcaatttcttttctctctaatcttatttcttattctgttttctggttgccattgtttgaagttgcttgttgtgcttgagtaaatacgtgaagtggtgaaacccatctgaattcatcacatctattccaagtggtataatacaagcttgtaatccaaatctaatgagaaatctaagttatgaagaatttcaaaagaactaagtacccttgttttggatgcccaaggatttacttgccgctcaagttaatgctcaacgtgcaagatacaacctctttagtatcccaaggtagtttccataagaattaattgagctcaaatcaagaacaatatttttatgtattaatgtgaacacttcctgaattatattagatatatggtctgaaggttggaagaaagattagcttttaattttaagtttgagatagtttttagaatcgaggaaagattagctcttaacttgtaaactaaggattgctttataagtaaaacattagttatggaactcttaaaattggttttgaacatttctagttaaaaatcccatgtaattctcccaaactagcttaaaatctcacatttcacaagctaaggagagacaaatggcgttctcttgtgaaacaatctaaaattttcattaggctactgttttcaagtatttatatgttagaagtgccgcatataggtacataaaataagtttacaaacacaagtaggaataaggaaaactaaaagagaaacttcagccatacaaaaccggctgaaatcagctactactttctactttctagcttcaaaatctgattgcaagtctcctttaagccaatcaccaatgaaaacctttcctccacatgaagtgtgctcaaatcaagagaagaaacccatcattcgcctatagctacctgggtcagatgaagatacggcaaaaaaaacgctggaaatcagtgaaccaaaataagcaccaattggatgctttctgtccttgctacattttcttctcataggactacttcaagccatacatgaataagcagttagatccagctcctagcatccatttgatcgtacaaatgagctccaaaaagataagtaaaaccaagcagccaaaacctaattaatactaatgatgaattagttgaatagctaatgacgatgaagcaacactttagtaggaatagtgttaattatgatcaatgctacttaatcttctgattaatttttggaaaaatgtcatatctaccttctgtatacacttattcataactatatcgtattattattatttttaaataactaccttttaagtaccaaaacctaagaaatcaggcacttgatggattccatccaaagatccatttggcggggcccactaactgacttttgattttttgcctttcctcttttggttaatctcaatggttcatcaataacaactcaatcttctccccatttcatcaaatcatccctaaatcagaactttttcaaattcacccaaatgaggttatggaaacctctaccaagtttattcgaccacttttagtctagctcaaagttttacacttgcttcaaaaactaagatttattaactttagaaattaggtttttatttttattttttatttaactttgtaacaatcttaaataactcaggtgctttctagagtttggctttaattgtttttcccttggttatgtgaaagaagtatgactactttctccaagactaaagtagagagcaaaaaatgcaattctggaatttcttgcaaaagaaaaggaacgagttaatgataatgaaaaacaaagaaaatgatgagaagagaggagctgaatcaatcatgatcatgtattttaaagttttttttgctattgaagtgacttaagaagaggaaagaggatgagtgaagacaaacaaaagaaaggataaatagagggaaatcttgggcttagaaaggtgaaaaggtaagaagatgagttagtgggccccaacaaatgtatctttggatataatccgtcatgccactgtttggggcttgcttaagtccatacattacttcactaattttacaaaatttattttcttgaccaagaactgaaaaaaccttcagtggtgatctattaggttttggaagttaaaaggtagttatttaaatgtttttaatataaaaggtagttatttagatatttttaatataaaaggtagttatgtgaataaaagtgtatataaaatgtaattttttgacatttttgccttagtttttcttgctaattcaccttttcaacttgaccaagttgctatgaggagaaaacgagcaattattaagcaaatcgcaacactagcattaatccatggcccatgaaactctccataattagagattggattagcacttagtagaacttcttgctcctgctccaggtttccattacttctttatctaagtgcatcaaaaggttgttgggttatgaaaggtggtggttgtgtatagtcattgtcaaaatgttgttaatgcactctatttagaggatgagggattgaatagttttcacctcgtgacctttcattcctttttaaaaaaattgataatgtgtattggtcctatgactgtatgaatggtaataagctatctcatgagctgttactatcttcctcagagtctaggtagaagggtttgggctgataattttctactatgtgcaattagtttgttggatttggatatgctagttgatataggtcctttcccttgggccttctcttaatataggcctacagtgtgattgaagataaatcttctggagaatataagaacaatgagatggattggttagaggttgatttgttcttttggtgtaagactatttcgggttctctattggttatgttcagacgccagaatatgtgttggtgattgttttccatgaacatactttatccgcagagacatttttcttttttcttcctataagattatatttgtttcctctcttggtgctcatctcagtgtctctactttacgttaaactgttgacattacttgacaatgcgtatatttgtcgcatggtgctcttccctcactccacgtcgaccccatacatcaaaaaatgccattaaagaatattcgaactcacaaccttgtgttgaaagaatggaatccctaccaatgactcattaattcattttctctttaagaaataaatgatttcctcacaaacttttaggctttaagagcccaaaagataaaaacataaaataagatagacatcaacgtcaagattagccttaaatgcacaaagcacatgtcaaatgattgataactactcacgagttgcaactctttgggcgttgcctaatattaattggatctcttttaaaaattgttggtggttatggttggtggagaggaccatgtaacttttagctggtcacaactggtaatgattgtcacttttactgcccataaaaaaatttaaactgttgaatatgtttctggcagtggatctgacaaatcctttacaagttggcgtccattttgttttgccatgtgactcaattataatacgtgagttttattatccaccaggtttggctcactaatttccggattaattcaatctaaactgtctccaaagaaggaaaagggtggaggaggaaagccttcttctaatgaaaagacacgcatacgtggttcgttttctttccagggtggaatgcaggtattagcatgtagctttcattctgttaacatttgtggttcttccagacatacatccaatgctttttttttttcttgctataaccataaacattcttgtcatgaacattctttaatactgttgctgagcttagtgtattcgttcattcatgtaatttcctctcttgaggttaaaatggcatacagccttacaacctatatccataatgctccttagagtagaatccctaggttataacatagtaccacttatcaaaataaacatggcacacactgcaggacaagaagtaaatccacctagagaactgagcacctagtagtaaaagcagcgatacattactaataacagtagcagggccataagagtagtaaatgggcctcatttcaacactccccccgtaatggtgagagagaagaagcagtctgaactcccagcttggagagcaaaatagagtgttgctgaacagggagaaccttagtgaaaacatctggcacttgatcttgagatggaacataggtaggctgaataaccccttcttcatttgtattgtccctcaggaaatgacaatctatgtctacatgcttggttttctcatgatgaactagatatgctgctatggcaagagcagcttggttatcacagtagataggagtagcactggactttttaatgcgaagatctttgaggagttgtttgatccacatcacctcacacacagcaagagccatggatctgtactctgcactgaccacaagaaattgcctctttgactttcaagatacggggggagtcaccaaggagcacacaaaaccagatgtagaatttacaacacccatcccattcactatcacaaaatgctgttagttgagcactagacttgttcgccatgagaattcaccctgttggcagcttgaagatgcacattagtggggcagtgcataaatttgcttaaatcatgtatagtgaaggcaatatcaggcattgccttgtaatagtgagataaatgagcttccccatcaatttttgatacacatcaggttgttgaagaggatcaccattgtcagcatagagcttgacatgtgagtccatacgaagcctcaatcgtctgcaatttataaaaccatattcatcaacaagacccatcacatacttctttagagataaaaacgatacttcactacactgatccacttcaatcctcaaaaaatatcttaggccacccatatctttcatgtgaaattggccagcgaagaaactctttgcttcctcaatagttgctaaactattgccagcaagaatgaggtcgtccacatacaccaatatagcactgaaacagtgagagttttgcttgaagaatagagagtagtcacacttggattaagtgaatacattttgctttaaagcagtgttagcttggcaaaccattgcctcaaagcctacttcaagccataaagtgacttaagcagcttgcacaccttagttcatttggtgtcacttctgccatcagtacttagctccccctctccttgaactttgatcctgttacatgtttcactatatcctggtgatagcttcatgtatacactatcctacaattcaccatgcaaaaaagcatttttaacatccatttgtttgcaagaaccaaccctctaaggatgcaacaacaagcatgtggtcatctttgctacaggggtaaaagtctgctcataatctattccatatctctgtctgtcacccatgattacaagccttggcttatgcctattatttgtgccatcagtgctgtattttgttctgatccatccatgtgagggatggctcatttctacaaaatcctagttccgttaggatttgtgttgttttcctaattctagtaggaataggactcctaaaatcctaatcctcctagttctgttaggagtttaaaagttttagtttgattgtaattctagttgtgttagaaatccaaatcctagattcatgtcacgtatggttagaacatggctagtaggataatttgtcttgtgatgtccatagccttggcatttgtggcacctaactttcaatagcttgtcttctgtctccttttctttctccttctttgaggaatcaacgtttttagagctatctaaaccactagcatcaatattaggtttaaaagtgctaaaagatttcgaatagttcttacttgcatacaatttctttttctagtttatgtagcgtcaccagggaacaaaaactcggccgttccgttctggaacggccgctttgtaacggatttcagagaggccgttccgttaaataccgttctagaacggtgatttggaattcacaccaaactcggcgcgatagcgttacgtaacggtgtaacggcgttccagaaccgttacaatcacataacgtccgttatttgaagaagaccagttcttttggtggaggaagaagaagagccaacgcaagatctatagatctgagttaaaatttgaaaataaaacatgtttttttatttaaattaaagcttacagaggatgtagaactcaaattcgagtaaacccctcctttaatttcattaggttactgcaaatcgaaccctaaattgcaaaccctaatttcgaaaaaaccctaatatgcattgggatgcaacgctgcttctccggtcatggcagagaaggtcgacgagtcatcttcggctgcttttagcactgtagctgccggtggttggcttgtttgcaggttagtgcttgctggttttctttctctcataccgatcatcttcttcttttctctcttctctttttcttttttattgtgtgactgccagtcacgtgataattgcaactcataaagtatctctttctctctcttcttttcatccctttttatttttctttcccttttagtttttattccctcacgtggaatcacctaattttcatccttttttatttttttagttacactcttacacagaagtatgttcaaatatcattatagtacctcaaatattgtatttataagagttttggacataatatgatatagaaagtaaaatagaagaaaaataaagtttaaatgtcacttgtgtgatttttttaaaaaaattcacgccgcgacggccgcgaaacgttctatttcccgttacaagccgttcccgcgataacgcgaccgttcccgcgaacgcgaccgcgaccgcgttttttttccttgagcgtcacatcttgcaagcttcttcaaaggtgagttatgtgtacaactccaatttctctccaatcccctccgtcctcatttaggcctccaaggaagctacttaaacattgatcttcaagttcatcaattttccaaagaatggataacttctcgaactcctttatgtaatcttcaacggacatattcccttgtttaagagtagaccattccatgtacaagctttgtttgtagttagaaggaacaaaacgtcctcttaacaactttttaagcttatcccaagtagagattttgggtttattagctttcacacgctgcctctttactccatccaaccaaatagatgcatatttggttaccttaagcacggccaccttgtatttcttttcttttggtgtctcttaatcccaagtagagcttttgcgtgtgaaagctaataaacacaaaatctctacttgggataatcttcttcttgtttccgaaacaactaattcttatggtagttaggaaagcaagaatggtttctaattcaatagggaatatattaattattattagtttaagttaaatagtgcacgaatctaaatagattattcgtctcaaaatctcacttaagtatagatttgtttggacatctgagggaagaagaagagagcgagataaaggagaattatcactcaatgaatccatatcccgagttttcccatttacttctttgaaagcaatatagttcacgaggtcttattatcagtctatggacataagagtaataatttaagggcaaaaactatgactttatgggtttaaactgatacatgttctgttaaactgatagatgttctgtgttaaaccgatactcatatattcctggttaaactgatagatatatgatttaaattgatacccgtctcagtcatgtcttggattgagacggtctgacacaagactttttgtgtattatatatctgattagaataaatttatcctgtttactaattattttatcttctccagacacttgttgacacaatatgcaatcagtttggtaaagatgaactcaaactacagtgcaaggtcctttcattgtcctacagtcataaggggatcccttcttcagaaaattgggtcgtgtcttctgtgtcaaaaaattccattgaagatcaacaatatgatgctgtcatcgttaccgtgagttttactttgcttactgctattgcaccaatctttcttcttttgacacactgataatggcaatgctgttgtggtttgaagccatgttatggggttttagggatatttatggagtctgatctaatatgttattggataaaattcagatctgtaacgtgactcaatgagattgaaaaaaattgaatcaagataatggattggaaaattaggagctaacctagggtctataagcgatccacttggagtctcataccaagcaggtattcgacattttaggtttatattgctgctatggctcatatgggagcctacatagggtctggtgcttattcctttttcttttgtctagttttggggctgcacatttctgttgtgttttgatatggatagccatcacctgcaattgcatggaggctgaactaagttctataggggagcaaacagtatctgttggaaatttattttcatattgtgtttttaaatgctataatccaaaatttgttgttcccctaaaatgcctaaaatacccttatgtaactgctccatctgtcccttaatagacttcccatttctccaatgcatgtttgccaatacacattttgtattgttaatatcaaaaattacatattagtaaaaattataaaagtttgattttcctaatgtacgcaatgagacgaatcaaacaagacgccatatgactatgttttttcttatacttcctatgttttttaataagtgacatgttttccttttagggaaatgtcacaataagtgacacatagctcaaagtagtaaaaatacttctcatttattacatctttgccattatttaattgtttcacctacctactttatccaatactcaaatttgattggttgaacaattggtcccaactttctctagactccttggtattccctttcccccactttctctctgtgtcacttattaaaaaatggaggacgtatattggaaaaaaattggaaggttttcttcacttatgaatagtggtaaaattagagatgggaaggctattttgggatggatggagtaatatttaaatttttaaaataatgtcattgttttagtgatgaaataaaattcaaggctattttttctagtaattatgttatctgtacatcaccacacgtatcgcgtgcatataagactagtttgatgatattccaacactgttcgaaggaagtcaggcatggaaccatgtttgcttccatatgggaaatattttgcttactctccttcaaacatctacctcattatcccagaatgattgatcgaatctaatacaaatatacaattgatcatatgccaccagggaattacatcaaattaaatttttatagaaggggaatcagtcatagcctcatagggaacgaataagtgatactcgccagtttctttcctggttacttttcctcttctcactagccatcctttatgtatgggtatgctgcatcattcctgccactggttgggactcccgtttgaactatggggggatgggaaagctaagccatcatcttcaaattgagtttcttgagaatgtaagacaccatctgtaagatgaatatagtgcactctatagtcaatgtcatgatctttatgggtttatctgctgaaataactgtgatatacccagctctccatttacaaagttttcctacatattaaactcttgcccgcaattctagaacttcattgtagaacttttcctacataagcatcatttgtcttttctgtagtaaaagttagaaagagctttattttagaacattcgtttttagttttctttgttgttgattactccgccacttttaatacttttatgattcaagtatttgacaaaatcatgtaatttaggtcctctgctgcatgcagtctataccctctctctctctctctctctctctctctctgtggttgtgtcttacttgttgagttactaactccagccattacataaagtaggctggcattatgatgagcaaattactcaagaccacatgttagctcctttttcttttctccttattctgaaaggcaaatataggtccatcttggtgcttctcatgtcataagtaagctgaccccctccttttccagggaataggacaataatccaaaagtgagggttttacatgttgggatttgtgaagtttcttattttacttaatagccgagtcagtgttacaatacatagtaccgtgttacaaaatagtatgtaacaccaagcatgtttatgtgcaaaattgtgcaagactttgttgctggcacgccaagggctgttttaatgtagtttacttattcttttaggtttttcagatgacaatcataaagggaattaggagtgtttttattgtagtcaatccctattgtgctacaacgataaaagaaaaaagcacaagactagaaggagaagtaatgtctaggaaagactcctcacctggggttgctagtcacctacacatcttagaaggcatcaaaccaaagcttattcccctcgactgttttcgggagaaaagaagacaaaattgtttctaacttatactttaccagtttcactacagcatcagaaagaagcaaaatatgctcccacaacacggcgaacctagctttccagatgtgataaaccagaccagcaaaatgattattttcactagagctttgagtctattttttcggtttttccccttcttcctggtaatgtcacgccaccaagccatcatctcaattttttgagatttgacgtaatcgctcaaatagctgagtaagacacttcttgctctaaatactaataaaaaagaggtgaatgtgggtctcagccatgttactcaaatcggataaagtgtctactcttattagggtttttgggtgttggactcatccatttttttttgtaaaatgtcaagattttggtttgaaatgagagattcaagtgtcgtgacatgagtcggcacgcaacacttaaacgtgtcgaagtaacagagggtctcagacaatcaactttaatcaatcacgaaccccaaaatttatgcaacctttgctcatattcagtctctgtaaagcactcaactgcagcacacccacccattcgcttcacctacagcaggagggcacccaagtaattgctatgatgagcgaattattctgttttgccttgctggaatattgctgttagatttgctgactcactggcagttaattatagtcagagaatgagaaatatcctgtagagagagaaagggtatcttttgtatttagctctataaatagctaaggaagggaagggcattgagagtttatgatattataataggagagatttagcctctcgaatgctgataggagcgtagctcttgttggattatcaatactactctgtttgctctatctatttctactcaggttccttcttgtacagtggatccctgattggatttacttcatcaaccagcagataaaattatttgtaggcacattgaaaccattccaaacctaatgaggccaaagtttatcacaaagaatataggagccaaatgtaggcaacagataagagtataattgccagaagttgaagactccaggtattgttcagaaaccttaatgcatatcatcattctgacactagattttccccggagccaactaacaaaaatgaattaaagagattaaggctatgtttagttcacctgaaattttctgatctgaacttatctgatctgatctgaacttattttttctgatctgatctgatctgatctgaaccaatctgattacaagatcttatcttttagatttttctcaatatataagaaaaaatatagtcatgtggggtcttgtttgattcgtctcaatgagtactttattaatattcaattattataatttttactaatatgtaatgaaagatataatgatttttaaatataagcatgatctgaactgatctgatgtgaacttattttttctgatctgatctgatctgattagatctgaaataagcaaaaataaggtgaactgaacatagcctaagcaacaattgagggaaaataagatcattatggctaagataagataaatatgtaatgataaaatcagagtaattatatcagttacactctcaacattcgtcagattgaggtttcctcccaaaatgccaacccacttttctgtattttcacgtccttctctctacccttctaggtatatattacatcagctgtaaaatttttgaaccaactagtagaatactgatctaccctcaactgcctcactttctcattttttctgggcctttttctctctagcacaagtccacataagtgatgcatagcagaaatataattccactagtcatcctcaatattgatataacaaacacatcacccacatattatcatttttaatcgctgcatgcgaggcatacttacccaccaatcaggatatgcataacagcgttcctaattccaaaaccaccatatatcttgggtttgcaactctcatccctagcaacaaggggactttctgaaaaagtggcagattccgcccacaagtagtttgtacggacacctttattatattattaatatcatatttcggcaacacaaattaccagcccagtaaaacatgaattgacatgagactaacaaggggcccaatctaatatcgtacgtctgtactaagcaatgtataaaaaaaagctcaaggtgcattgatgcaatagggatcctaatgtgcataggtgcgcctcattgaagtgaggcaccactaaggataaataaaaaagattgatgtaaaattaaattgtgcaccttgggtgcgcctcgatgaactttttttgtgtgcctaagtgtacctcaagtacgcctcattgatatcgcctcgcctggcagaaaacgagcttgaccccaatcgccttgctccccaccgcctaggcgtgcctcagtcacactttttaaatacattggtattaagtactcagaatggcaaaaagaaactttgggcattaattagacatttcactttttgtgcaactatttgtgacttcagagattgatatgttttctacattacagacttttgtgatggctgcatggtctccactgtcaaagaacattagtttaagtagaagaaatattgctctattaccttcctccctctacaaacaaaatcctaaaatgtggttatgtagtgccaattcaaacttgtagatgcatgactaatgctttcattatgctgtgggtttttatactatgattcatgtccaattacataacaattagctggagtcaggatatgtcacggaaattttaagcctggcaggatgattgtttatattttctctttttcggtgtttaagtcaaagtaaacttctaggctgctcttttataggctagttgggctgttggggagatctacacattaagtgtgaagaaatcttgtctaactccagtttggttgagaactgtaagctgtcataacatttgttgcatgatgaggccttgtgggattatcatgttagctgtaaactctaaacttacttgaaatctagtgttgtgtctccttatttctgtagtcaaaattgaaccttctgtacgtttttgatacctgcgactagaatgatggaattctgaattactgatactattacaaccatctgctaagaacgaagatgactcttagctaatttctcagcagatttagagaaattaagaagaattactaatgaatatttaaagagaaaactaccaagatatgattgtattgatgaaaaacaccaattacaacctaaccaacattcgagaggttggagctctcccaagtaaccatttctctcactaaacttatcaattttcaagatgccttttccattctcagttcctctatatttatactactccccttagcaaactacccaacttattccccaagtaaactaaagagataatatctaaaatacccttccccctacaataatattagttcttagcattaccggccccctaaacttccaccttgtcctcaaggtgggtcgtaatcatcactaaattctgggcctctactcgtatattcagtgtcttgcagcccttcaggccccaagcctaggttatgcagctcgtgttgcggctcctcctcatatagttctctggctggagtgagtgcctcaactataatgaaaaagtcctggaggtggggaaggaaggagtgtctgaaatggtgtggtgtgctgctggtgttatgggcttgtgcctgaaagttttgggtttaaagagatggagtggagaagagtggagaagtgactggagacgtaaaagaaggaatcataatttttgtaagtggtgggttgaaaaagttggtgggaagaattgtttttataaaatgtagtgtaatggtcgaaaaatgggtggagtaagtatggtttttggctggggatgtggtactgggttgaaaataaataggtctgagcttacttgtaaaattggcctcaacatgagcaggcccaatatcttgagccaattccccaaaagctggcaatagagcactcttaattgcattgttgtgggccatcgggctccaaacatatattcggaggagccggacttctttggtgatgtcattagcttggcccattgcacactttcccttaacagcctcaagatcttttcccacttttgtaccccaaccacgtggcttcaccatcctttctttcttgcttttgtcacttttttggcaatatacgagtttgtccttactaccctcatcttctaatgttggcttcctcaccaagcttaatttctggaattttgtccaccaaatcccaccacccatcgtcaacaccatacctatctacaccggccaagaagcctggtcctccacccgaattttcgccacagacaaagcctgaacaaccgtcagttctctcaccggagaagttcacaggtccaccacctgacccactagttgctgatccacccttcacaaatctccctcctctggctgccacaagtagtggttcctccgtaatactcatatttctcgtccaagagccctggaccaccaccggacccacttccaccggcaccaacttgttcaaatgatacttctctttcttttccaaacagcctacttggactggaaaaaccactgcgattgtagcctccgccagatctgtagcctagtgcacctaacgtgcttccaactgcaacccaatagggatggaaatggatgggattcggggagggtggagcatcacccgcatccgtcacccgcatccattcgctccacccgctccacccgcatccatccatccgtcacccacgggtgaaacgggtgggtcggtgataaacgggtggaaccatttagggggtgtttggtatcatgtttttttacaaaagaaacagaatcaagtaacaaaatccgtttctacttgtttggttctatgttgctcagactcgagtacccatgtccgacacgggtacgtgtccaagtgtccaactcagctattttctagaattttttatattttttaacccaaaacaaagtgtccaagtgtcccacccatgtccgactcccgaggatccgacacgggtacttgaggtgaaatgaagagtccgagcaacggaggtttggttagtgtgtaaagtaacaattaccgttacttgaggaaaacacatccccccaagttgtttccattcaaaaacctaaggaaacaaataacgtttcactcctcaaacaagaggaaagggaatgggttatatttatttccattccattaggataccaaacaactaataagggtaacacttattattatcctttcccctccttatcaaaatcctttccattccgtttacggtattcataccaaacacccccttagtatattttctaatgaaatttgtgatatgatatgcatgatataaaataattctatcaaaaatataaaaagtaagtaaacttacatgtacaacttaatagatgggtgatgggttggaggttaaacgagtgatggatcgggtgacgggtgaagaaattctcacccaccactcgctttccatccatttaaattaggtttttcatccatttaaaaaaccgggttaaacaggtgatgtatgatccatcacccatttccatcctcaaacacatcccgatttgtttactgcaccaccagatccaccagtataaccacccgaaaaatcatcatgccttctactagccttgtaacctgctcccggtgagaagcttcttccacaagtggtggtcgctggacctccatctccttcttccccaaaaaattttccatgacacccactcgacccttcatctgtgacaacctcttcttcgtccacctctgaagttttggggtcgtcttcctcctcaagctcctcttgaagtaactttaacttccgttggatgggagagaacgcttcattgattatcttcaccagatcttcttgaagtttctcgaaactttttctcacgttttcctctacctctttcgtgatttcctttccgatctccttcatttttagactaggagctcttgcgattccatggcagatttctttttttaaaacaagaaaatcaggcacttaatctcccagaatagtggtgctctgataccattttctaagaaccaagatgactcttagctaatttctcagcataacaacaaatttagagaaattaagaagaattactaatgaatatttaaagagaaaactactaagatatgattgtattgatgaaaaacaccgattacaacctaaccaagaggttggagctctcccaagtaaccatttctctcactaaacttatcaattttcaagatgccgtttactactccccttagcaaactacccaacttattccccaataaactaaagagataatatctaaaatacccttccccctacaatattagttcttagcaccatcaaactgggatggatggttttgtaaggttccaatttacttctccatcaaaatattttaggattttttatctcatgtattttagagtttcctcgtccctttttatctgataagattcttctgatgatttgattttatggtaggctccaatcagcaatattaaagaactgaagattctgaaagctggagttccattttcacttgacttcattccagaggtttgtatttttatagtggttagacatgcttcccctagttttcaaagtaaaagcatccttgttgtgacgatattttttcccttgtttttgtttttattattatcatcacttatttccattttctattttccatgctgataagatgttcatcaccataatcttgtggtatcagaagtgtttagtggagtttattcactacacatgcagttgttcttttgccatgaccgccattcattttctcgtcaaaacaaatctatgaagtttggttttcagactcatggttcttgtagctcttgtgaatttttttttcttctccttgcatgcattcttcaaattacatattgcatataccaggtgctctcctttattttatatttaatttttaaaattctatcatatattttttaatgtcaaacctcaaactaggggttcactgcatcttaggcttaccaggctaatatttctttacttaaccttttccctttatatttgctatcctcttgtgtagtaatcaccataagaagggtacaaactaaattaccctcccattcttttgtatcattctgaaatagtgtcacagagctttgatttttttgccctcatttaatctggcaaatgttctctctatttttttttttttactttcttttgacgggattctcaggcaattgttacggggagcagccagtcacactgtttctgtttattatgcaggtgagttacctgcccctctctgttatgattactgcgtttaagaagaccagcgttacaagacctcttgagggcttcggagttcttatcccttcgaatgagcaacataatggactgaagactctcggtaattgtctggttcacgtgtgtagcgaatcagattttcaaaccctgatttcgtaacattgcaggtactctgttttcatctatgatgtttccagatcgtgctttctccgatatgtatctctatactacctttgttggaggaagcagaaatagagaacttgcaaaagcttcaacgtatgagatatgcaatgttttaaatgtatgctatagtcatcgtttcaaccttttggtgcctttttcttactaatttatcctcctggtttaatgatcttagggatgaattggagcaaatagtttcgtctgatctccaccagctgttgggcactgagggaaaacctacttttgtgaagtattgatatctttcacccaacttaacatgatttgtgcttataatatgttaaataaagtaactgaaatcctgaaattaagactacgaaactgtatggtgacagtcatttttactggaacaatgcattccctttatatgggcacaattacgactcagttctgagagcaatagaaaagatggaaagagatcttcctggacttttttacgcaggtaatctgtcatttgcttgttgcgataaagttcatgtacagttggcatatcaatcaacttgcattctttcttgctaactccaaacaatcaggatcattaacttgtaggctgcagcaacagagagtatctcccaagttgttaggtttcatgtaacctcgtcgctgagatgaaatttccgttggctaaaaagtgaaagttttgtattgatgttacccaaaacaaaagtattttgcatgttgcttgaagttttggttgtttcagatagtacatcctttgacatgaaaataaatggaaaagcgtatgtcaagcaattatcatctagtttctttgtttctagatactagccgcatttgatcccagatcatttttgaggaagtcagctgaaataccgtagctatccttcagttttcataataaaactttaatggatctgatgtacagtaatttagtgtgcaccgggttaataattgatattaacttcatatagtgagtcttataaagatataatgaacttatatacaatatagtggattttattaatggaaaacatatagtgaaactatatgcaatatagtatgatacataaagacttagacaacaagagcattcgaaattacaaagaacaaaggaaagaacaattgtatcaaaccggttcgaatgaacaaacaaccaccacttccacaatcaatgtaccaccaatcaagactaaactataacaatgagcttctagtttaagtctactttgagttttaatcaccaattcaacgattagatgatcaaaattgcaaaggttaagagttggtcaaacctaaccaagagttacactaggcacatagctttgttaggagtatattagtttatgaattctagttaagttagaaatccaatacctagttggattaggattcctaattggattagaattatagtttagttagaattctagtaatagtaggcgtgtgattaggagatataattagcttaattcttatattgttagtttaattcttatcctcgttttaggtttatctttagtcgaacttgtaccctatataaggggcctttatttcattaataatatagtttattttgagtttaaacctttacttgtgattgtttgcttgagaggttattaatcgaaccattaataacttttcaggattgttaagtttttagtgttaaacatcttaatttcaggagtgattttaagagtgtttagattcttgtattcaagtttcaggactgatcttgaatcaagaaatatccctagtttcgactaatatcataagtagttcgaattcttggagtcttttcttcaagattcatattcataacttgattatttagacttcttggttttgtaatcatatcaagtggtatcagttttccagggaggagaggatacaaagggttctctttgatcaaagaagatccaagggcatcaataagaatgacacttgcaataagttcgagtgatacaaacaacttcaagactcgatcttttgctaccaagaaccaatcttgacgcctgaagattgttaggacaaaggataagaagtgtttctacatccaagattgcattctttacgtccaagattgcgtcaagatccattctttaagttcaagaaaggagtagaaagcattcgaacactacttaaacatgacatccgagatggataagctggctatggccatgagtgccttggcacaatcacaaactgagtcacgcaaccacatgggtaggatggaggcacgtgaccgtggattgaaactagatgactatagtggagatggcaatccagaagacttgttggagtggatttgccaactaggcaaagtgagtgattataggggctttgatcacaagaagagattcaaggttgcttccattaggctcacgaagtatgctggaatacggctcgaaggattgcatgcacaaacttcttgcctaatgactatgaacaaaaacagttcataaggctcgcatcaataagccaaaacacacttagtgtacacgaatacagcatggagtttgacaaattagggcttatatgtgacatagaagagaaagagcaatacaagattgcaatgtacattaaagggttgaatcgatatatagccaagaagatcgaagtctcaacttatcacttctttgaggatgtgactaaattggctaagaaattcgaagagcatgacaaagaagaagggcctaagagttcttacacacctaagtatgactctagtgctaaagggaaatcaacagttccctactcaaggtggtcggaaagacctaagaaccccactacacctaaggaggacactagcatggagaagacaaaagtggccgtacctaaggagagtttaattttgtgttttatacatctttgcttaagagcttaacaattgaaactattaataacttttcaggatggttaagtttttagtgttaaacatcttaatttcaggagtgattttaagagtatttagattcttgtattcaagtttcaggagtgatcttgaatcaagaaatatccccttgttcaactattataattgatcttattcgagttcttggagttaatttcttcaagattcatattcatacttgattattagacttcttggtttagtaatcatatcaatatcattagcattaatttacccccagggagattaagaaaggattagcctaatcaaggcgcttaagaagtttttaggaaaaatcgtgcttgttaagcttaagaattgaacttctttcaccatttgcccttgattctcttgttgaactagaagatcttggttcatagtagatgctcctgcatcatagtagagcatttaattttaattttttaacatgcacgaagatgtaggtagtgtagtatatatcgtgagacgtggtttaacatatagaaagatgtagtttctgcatgatatagtgagtttttgcatgatatagtgaatgtctgaatgatacagtggatcgttccgaattgttgtagtttgtatgatatagtatttttgtgaatgatatagtgagtttcttcatgatacaatgggtttctgaatgatatagtggattgcttagaaatgatatagtgagcttttgtatcatgtagtaggtttctatgtgatataggttgttaaaagatgatacatgcttttggcctcatgtactctaatgttaacgtgaacccggtccttgcaagtcaattgcagttttttcaatattaagctatttttttttttttttttttttttttttttttttttttgtacgggaatatttagcatctttaccacaaacataaccatacgaatattatgcggaaattccagtctgaagtcttaacttttcaaaattaaaagcttctatattatttttggaatgaaaaaaaatgagctatggcatgttattttgaaatacaatgagtctcaaggtgcatagtggcttcaattctacgaataatgaatggactactgatttctaattttttgttccgggcttttgcattaggtaaccataaagatggactctctgtgggaagaactatttcctctggatacaaagctgcggagcttgtgatatcctatctcaactctacttaagatgcctaaatgatcgaggagactccgtaagtcctttctctgattctatctttgaactgagtggaaacacgactgtggtctaaagtagttgatgtctcagatatccagaaatggcgttagtgatattcaggagctgtccattgaccctttgattcattgttgcagtttactgaaagttgttagctggtctcagaaaaacgaaaggaaaaaagggggaaaacaaaaacaaagaaacgtagattgtggtgttaaaatcaagaattccagagatttgtaccttctttatcagttgaattgtttacagtgtgaatcaagaagttagctcgaccttcttttcttgtgaatggtaagatttcgtgatcatcaatacttgattgtgctgtttgcaacttcaacggtaagatttcctgatcttacagtttaattgcttgtgctgtttgccactt

SEQ ID NO: 11 - DNA, 1575 bp, synthetic construct
  misc_feature 1..1575: note = R126G mutated Beta vulgaris PPO2
  variation 378: note = n is any nucleotide
  source 1..1575: mol_type = other DNA
atggtaatgctatacgattctcacctctcaggagtctcaactcatcttcaactatcgcaggcatttcccaggaagaacccattaatggccaaagtgtctgagccgggtaaacccacttctgctaaaaggattgctgttgttggtgctggtgttagtggacttgctgccgcatataagctaaagtcccatggcttgagtgtgacattgtttgaagctgatactagagctggaggaaaactcaaaactgttgcaaaggatggtttgatttgggatgagggggcaaatactatgatagagagtgaagcggaggtcacgagtttactcgatgatcttgggcttcgtgagaagcagcagtttccaattgcacaaaacaaaggntacattgcgagagacggtcgtcctgtgctgataccttcgagtcccattgcacttctcaagagcaatatcctttcagcgcaatctaagctacaacttatgttggagccattcctttggagaaaacgctatgcttctaagatttctgatgagcatgctcaggaaagtgtgggtgagttttttgagcgacattttgggaaagagtttgttgattatctaattgatccttttgtcgcgggtacaagtggaggagatcctcagtctctttctatgcgtcatgcatttccagaagtatggaatattgagaacaagtttggctcactaatttccggattaattcaatctaaactgtctccaaagaaggaaaagggtggaggaggaaagccttcttctaatgaaaagacacgcatacgtggttcgttttctttccagggtggaatgcagacacttgttgacacaatatgcaatcagtttggtaaagatgaactcaaactacagtgcaaggtcctttcattgtcctacagtcataaggggatcccttcttcagaaaattgggtcgtgtcttctgtgtcaaaaaattccattgaagatcaacaatatgatgctgtcatcgttaccgctccaatcagcaatattaaagaactgaagattctgaaagctggagttccattttcacttgacttcattccagaggtgagttacctgcccctctctgttatgattactgcgtttaagaagaccagcgttacaagacctcttgagggcttcggagttcttatcccttcgaatgagcaacataatggactgaagactctcggtactctgttttcatctatgatgtttccagatcgtgctttctccgatatgtatctctatactacctttgttggaggaagcagaaatagagaacttgcaaaagcttcaacggatgaattggagcaaatagtttcgtctgatctccaccagctgttgggcactgagggaaaacctacttttgtgaatcatttttactggaacaatgcattccctttatatgggcacaattacgactcagttctgagagcaatagaaaagatggaaagagatcttcctggacttttttacgcaggtaaccataaagatggactctctgtgggaagaactatttcctctggatacaaagctgcggagcttgtgatatcctatctcaactctacttaa

SEQ ID NO: 12 - protein, 524 aa, synthetic construct
  REGION 1..524: note = R126G mutant protein of Beta vulgaris PPO2
MVMLYDSHLSGVSTHLQLSQAFPRKNPLMAKVSEPGKPTSAKRIAVVGAGVSGLAAAYKLKSHGLSVTLFEADTRAGGKLKTVAKDGLIWDEGANTMIESEAEVTSLLDDLGLREKQQFPIAQNKGYIARDGRPVLIPSSPIALLKSNILSAQSKLQLMLEPFLWRKRYASKISDEHAQESVGEFFERHFGKEFVDYLIDPFVAGTSGGDPQSLSMRHAFPEVWNIENKFGSLISGLIQSKLSPKKEKGGGGKPSSNEKTRIRGSFSFQGGMQTLVDTICNQFGKDELKLQCKVLSLSYSHKGIPSSENWVVSSVSKNSIEDQQYDAVIVTAPISNIKELKILKAGVPFSLDFIPEVSYLPLSVMITAFKKTSVTRPLEGFGVLIPSNEQHNGLKTLGTLFSSMMFPDRAFSDMYLYTTFVGGSRNRELAKASTDELEQIVSSDLHQLLGTEGKPTFVNHFYWNNAFPLYGHNYDSVLRAIEKMERDLPGLFYAGNHKDGLSVGRTISSGYKAAELVISYLNST

SEQ ID NO: 13 - DNA, 37009 bp, synthetic construct
  misc_feature 1..37009: note = R126L mutated Beta vulgaris PPO2
  variation 3684: note = n is any nucleotide
  source 1..37009: mol_type = other DNA
tattccatcgaatgtagcaaattgactgtccgttgcaatttcggagtttccactcgtcgcatggtaaatggtaatgctatacgattctcacctctcaggagtctcaactcatcttcaactatcgcaggcatttcccaggaagaacccattaatggccaaagtgtctgagccgggtaaacccagtaagtcaaacattcgaatcacaactcaagcaaatttgtcttgtttgcgttatattttgctcatttcagccttttttgtttttccgacctttgcatactgaatattgtgtgtgtgtgtgtgtggggtttcagcttctgctaaaaggattgctgttgttggtgctggtgttaggtaaattttcgtctcttgcagagtttttgagtcatttgggaattctatgtgaaacttgtaactcccttcagtccaacgaacgcagtacaattttctatcaaatcatggtcctaatttccaattttccatatatattgttggaattatattgggattgtctatcactattaatagtattaggatcaattgtagagaagcacagaaatttttgggatcgaaagaatatctggattgccacattaacagcagatataattcttccaattggtttttggttcttcctaccttgacttgtctggtcaaacattataaactttaacctttaatatccattaaagtaaactataggatttttttgtctaaaacatgcttatataacatgaaatttgtgagaaaccaccttatatatatttttttgcgaaaacaaaccttaaacaaaattattatcgtgagaacaaaccttatgccaatttcgatcattgacccaaggttttggcattgaccgtgtcatgaattttgttgggtttaaaaagtcatgtgtcttgcatacgaaatggtaaatgcgggaaccttgggtcaatgtttggaatccgcataaggtttgttctcccaaaaaatgtttttgttcaaggtttgtttttgcaaaaaaacttatataaggtgctttctcagaaatttcatgttttataaagtagtatttgacaaaaaaccctaaaatatattatagaattattattgactaaattgtgtaaaaatgtactcttctaaaagtacattatagtattttagtggaacatttgcgagaaactactttataaatacgatttttgcgagaaatttcctaataaaaaaatgtgaagtgcaaaactatcttattgataattttctactccctcaaatccaaaatactatgaagtctttcctttctggtttgtcccagattagtttgtacgcttccatctttggtatgatcccacttttattatacttattagttttacgtgagttccttactctatctcttttaacaaaaatactcaactatctctatccaataaaaagttccttactagtcctatcacatctgctttttaataaaataacgtttgataaccacacaacttatatccttaaaatacacgttcaaccaagtgttgagattaatttggacggagggaataaatattttttgaggcatattggtagcagtattcggattccgataggttgactatgtttccaatgttgaccaacacttgccttgcatgtaattctaactttgctcttttttattcttcatttccctcgtattccatatacaatgtttagagacccattccttcctcttctcttctttcccttccttactatgctttgccataatcttcctcaaatgagtgcaaattaatttgtcgttgatgtaggccaactgattgtagcacatcttcatagttcatacctcaacacactcgtaattatattataccctacatgttaaatggctcatgaagctttattttatatcatacttcctccgtttcacaataagtgtaacacttttcttatttggaataatcacaataagtgaaaccaagctccaaatggtaagaaaagttcactcttattacaaatataccaccaaaaagtaagaggggatcacaacttcaatacttcttcactctactttattgtggtcccaactttctctctctaaattccttggtaactccccactttctctatgtttcacttatggtgaaatggaggaagtattttgtagtggtatttagctactaggccttggatgatatacaatcatacaatgtatttatattcacgataatttgctgcccaccttgattaccatgatttccaccaattttatcaatttcagtacttcaccaccccgaatttatattttttatttccaaccttggtatctccatttgtctgagtgcccgatccatttgtatcgcctccagaattgaagaagcttcctgcagctagacaattaggaaggttaaaaaagtttggagatggtggaggatagccataataatcattgttgggaggtggaacttggaaggttattgtagggttgaagtccttgatgaagaagaattgagttcaaatgagaggaaaaaggagcagggaagagggacaataagaaaaaaaagggtaaactaaaatcacgtgtaaggcatgtgcagatcaacatcagaaagcatagtcaacctactggtattagggcactgatacctttttgggtcaaaatttttttacaaggtatttcatgaggtagttttgtccatttttttttttacaaggtatcgtctcattttttttttatcatttagtttctcgcaataagtgtatttcatgaggtagttttttccaaaatttcctcatttattataaaatacctcatcttttccataaataatgcaatgtctagacttttacgctgtttacacatgctcctttgaccatctattgacacacaaggaaaaatagagtagagtcatgcaggatcttgttagatttttctcgatatatactttcaaaagatcaatttttttataattttttttttgaggggattttttttttataattatgtacttatcaaaggtcaaagttgtgcaccgggaagcataaaactctatgtgttgcaatttacatggaaggggaggagtataataagagaaaattatggtaaaaggttcattcctggagatcatgagaaaggaagtagaaagaacaaaaaagaacaatgggagtgcttttcaatgtttgttgtacgtagcatttattcatttgctataatgttttgtgacattgtagtggacttgctgccgcatataagctaaagtcccatggcttgagtgtgacattgtttgaagctgatactagagctggaggaaaactcaaaactgttgcaaaggatggtttgatttgggatgagggggcaaatactatggtaatgtttttgattattgcaggtcttgcactttagcgcacaattaatttctggatttttttttgtactgtggtggttatggtcatcaacatgtctcacccactgtgcttgcagatagagagtgaagcggaggtcacgagtttactcgatgatcttgggcttcgtgagaagcagcagtttgtaagtctttcattatctgaatggcacatactttatttcgaaagattgtaattgccttttctttctagatggcttcatcttcatgttgctttctgattcagtttcgtggctaactttccaagtttgtctgattgctaactctgtcatagccaattgcacaaaacaaactntacattgcgagagacggtcgtcctgtgctggtaagtttgcttgttttacttttgacctcttttaagatctttcaactctggagcctggaaacatggtgatgcaggaggcaagttctctctattttacatcctttcttctctgtatcttatgacatttgcctcttattctgtgcagataccttcgagtcccattgcacttctcaagagcaatatcctttcagcgcaatctaaggtcgttttatgttaagacatacttgatgctgagagtttattgaattcttaaccttcttcttattttttttttatttttttagcaaaaggtaagtatattgcatttaccaaaaaacagtatgtacaccaccacagcagccatgtcagaatctagaaataccaccgaaaaaatcctacacccaaccagagacagttatattatatcctactcctaagtttctgtacccaatttacatcaatattggtccatttacaagatatttttataattcacagaagcacatcagttttaattagtttaataatgacctctggatgaataaccaactcagaccatatagccttattcctggctttccggaagttgtacgccagagcagcaagcacagcaatgcaaacctgtttcttatacctccttttatgtgtcttagcccatctcttatagctagtgaagatacagtcgtgtgcacaggattgaaccccaatccaactagcgaaagcctcacaacattatgactataaatacatctgaagtataaatgctgcacctttttctcctcttgcctgcacggtatcagaacaaatcccagctttagctaacaattccctggttttcagtttattcaatgccatcatgcaagcaatgaaagaatgttttggaacattcagtttgttccaaacacagtgagagcaagggacctttcctgcagttccacttagccacttatatccctgactaatagtatgactctttgcaccgtaaattgatttcaacttaactttttcataagcagtgaattgtgtgttgttagagtgtctagctgtctaggagattgggagaaaaggagggaccaaggagatagaaacacacctttgtgtttctttgtgtatttactttttagggtgggtcacgttttctgagaaatttgggaaaaggaagaaatagtaacacactttcccatttgtataacctgtatactggagctccaatataatttgcatttttttttgagctgcaagaatatgttgacaaacagttattgcttcttcctcagctacaacttatgttggagccattcctttggagaaaacgctatgcttctaagatttctgatgagcatgctcaggaaaggtaatgtcaagacatgtgttacctcgccttaattttcgttccaggaggtgagcatgcatttagaactaaaaggcacaaagactgttggtggtcttgcctgttcaaatataatggagaggagttttcgctacatttaccctctcttgaagtggggttgaaatatagcatcaagttgaatgcttgattaagtttaaaggacttgtgtaactctttttctgtttactgtgattacatgacctggttgattaacataatggtctgtttatctgtagtgtgggtgagttttttgagcgacattttgggaaagaggtaatggtttaccatagtatttctgctttagtggtaaattgtaatgttgctgataattatacttcgctgcagtttgttgattatctaattgatccttttgtcgcgggtacaagtggaggagatcctcagtctctttctgtaagtgaacattttgtgcttcactcccaattttttggaggctggaaatagattcttttccagttgttctgtcaaaaatagatgtagctttattttgaatttgaagttcccaattgttcattttgactattactgattattgctaagagtggcattatgctattatgctcctaaaagaaaggtgaattttgacctacatatagtataatgtatcaatattggtttaattgtttgttcttttgttccttttggtgctcatcttgcgccttgttctcatcgctcgttttttcatgttgcacttgatttaaatttgctcagcttaacttgtctttttgaatttatattacttattgctatattttactaatttcgttgaaactaattttttgctgaacttttcgttttgttgaaatcatttttctgaattaacttgattttcctgaatagaattgaattttggtgatcttaccttttctgcagccttttatttctttcttgtcctttttccaatctcatttttttatatttccattgtgttgacatcttatcattaactgtgcagatgcgtcatgcatttccagaagtatggaatattgagaacaagtatggaccataagacgtttattttaatcgacatgtatgtttcttagtttatacatatattaattctgtggtaaaaaaaccgaacaagaatatctttttttttttctatcatcaaaaagggtgaatatatgtagaggaaaaagatttgaatcaagatattagcctaaagcaataataatgttagtaatagctttaataacaaattcaaaacgtacattaatgaaccgagaggccggaaaatagttaaagtgaccactaagagaagcgaaggattcatgatgggttttcaacccagtagggcaaatttgttcaatgttctttacaaatcaagcttattaccttgtgggtgtttttgctagagatgaatgatagaattttccctagttggaagtcttttttggttactttatgggagctagtgatgtaatttgtttcgccttatggcatttcctaacatgtgcttttgtgatgtattgaagctttttttttgccttaatttatgctggattttaattttgttctttgtttcatttttcttgcttttgaaaaaaatatatagatatgtatatattaggattggtcgaggattttgagggaagggaaagacctaagaaaacttggatgagggtgattgatagtgatatgagtctatttgggatcgaagaaaatattcctttggataaggtgtagtggagggttgagggagcaaatttatgcagattagcttgacttaaagtttttctttttgattatttttcatttacttgtgttttgcaaacatttactcatgaatgatgtaaacttcttcaaccaaatctctggaaaaaaataatctacatggaaaaaacattattaatgttaacttgacagagatcccatccttgtgaagcagctagcaattaggcatctaacaattgacattttaatggacaggatagaatgtctcttgatagtcaataccctctgtttcattgtatcccatagctactaatctagtttgtatctttccaaagaaccattattttgaagtttcaccttgaacacccattttgaaccaatatgtttcttgcccttggggagaggggctaattgccatgttttgatgcggatgcaaagacacttgttctacctgagcctattgacttgatcatggatactctagggtttgaactcaagggaaagaatcaagtcttggcatgtgtggtgacatggcgtggggatggagtaaagaagagtcatagttctgttaggatatgttcttgcttgctacatagaatcgtagttctgttaggattgctatgatattatatctagtagatagattttatagttaattaggataaacatgtgatgatcatgttataataggcatgtgattagaggataggattagcttaattcttatcttgttgttagtttaattcttatcctagttttatgtttatcttagtcgaagttgtagccatataaagggcgttccattcattaataatacttagttttgctttgtgttttaaacatacttcttgattattgtttgcttgtgagctaactaatcaaaccattaaagacttttcaggagttttagtgctaaacatcttaatttcaggagtgattttaagagcgtttagtgatcttgaatcaagaaatatccttgttcttgttcgactaatatcagtggttttgttcgagttcttggagttaatctcttcaagattcttattcaacttgattgttgagcttattggtttagtaatcatatcaagtggtatcagttttccagggaggagaggatagataggattctctttgatcaacaaagatccaagggctatcaacaaggttcaaacattgctgcttgttcaagacttgatctttttctaccaagatgcattctttacgtcacaaggtagtaataacaagattaagagtggtttttacatccaagaatcaatctttcacgtccaagatttcatctttcacgtctaagattcattctttaagatcaagaaagttataacaagcatagaagaacacataaccatggagtccgagatggacaagcttgccaaagctatgcaagcacttgcaaagtcgcaaactgaatcacagagtcgactcaatgagaatactaccacaatcaatgggattggtagtaacatgaataggttggaggcacgcatggatgccattgcaaccatcatacaaaagaagcttgatcggaatagtgccaacttcataggtgccaattcagaggaagagttggcagaacgtgaagaaagatcatccaagactacatacaatgatgatcgtggcttaaagttggatgactataatggagatagcaatcgagaagacttgttacagtggattcgacaacttgagaaggtatgtgattatagaggctttgatgacaagaaaagattcaggattgcctccataagactcacgaaatatgctggaatttggcttgaaagcttcaaggcacaacgagccaagaaaggtaaagaaaagttgtgtagttggacaaagttgaaagttcaagcttaaagagaagttcttgcctagtgactatgaacaaaaatagttcataagactctctactataagccaagacacgcttagtgtacatgagtacaccatggaatttgacaagctagggcttatatttgacatagaggagaaagaacaatggaagattgcaagatacatcaaaggcttgaaccgccacattgccaagaaggtggaagtatccacttatcacacctttgaggatgtgacaaagttggctaagaagtttgaagaacatgagaaggaagagaagcctaagagttcttacacgcctaagtatgatactaatgctaaggccaaggctagcttcctactcaaagtggtatgaaggacctaagaggctaagaacctcaccccacctaaagaagacacaagagttgagaagcctaaagtcgtcgttccaaaggagaaatttgaagagatgagaaagtgcttcaagtgtcaaggaaggagacacatagcaagcaattgtcctaacaaaagagtcctcaccatgagacaatacctagctttgcaagaagaggaggatgtctattagttcgtccctgatgaagagcaaacttaggggaagaagaggaggaggatgcttttgctgaggatgatgcaaggctagtaggggtcaagaggcgcaccttacatgtcgaccatacacctagcatggagcaaatggaaaaatcttttccacactagatgcaaggtaggtgactatatatgtaatggtataatagatagtggttcttgcactaatgttattgtatctgaggtagtgtcaaagctaaacttagctacaagggcacaccctaagccatacaagttgagtttgctagatgatagcactggcatgagagtaaagaaacaagctttgatttcattctctataggggttataaggatgagttatggggtgatgtattgcctatgagtgcatgtcatctcttgcttggaagaccattgcagtttgataaaaaggtcatccatgagggggactctaatgtgtactctgtgttggttggttctaagagggtatgtttgcatcccttagctcctcattcagtggcgccaaagcaaccacctaagacaccaagttactttctatcttcaagggagttcgaacaagaggtggaggaagaaggttgtgcttatgccttgattgtaagacatgctgccacaagtgtcaagactactagcaatgagaagctcgaagccttgatgaaagagtttgaggatgtctttctagaggaactacgacccttgagaggcatagaacatgctgtagaccttgtacctggcgcccctttgcctaacaagcctgcttataagtgtgatccagtggcatctagggaattgcaacgccaaattgaggacctaattgaaaagggctatttaagggagatcatgagtccatgtgttgtgccagctttactagttcctaagaaagatgacacatggaggatgtgcatagatagtagagcagtgaacaacattacagtcaagtaaaggtttcctatgcctagattggaagatatgttggataagttacatggggcatcaatcttttctaagattgatcttcgaagtggctaccaccaaatgaggatcagagaaggtgatgagtggaaaacaacattcaagaccaagcagggattgtatgagtggatggtgatgccatttgccttatgcaatgcgccaagctctttcatgagcttgatgaatgaggtacttcgtccgttccttaacaagtttgtggttgtttacatagatgatatacatatctatagccaaaatgtggaggaacacttgttgaacttgcgtagcttattcatgaagcttagagagcaccaactctatggtaagattgatggcgacgaggttgacgggggattatggcggcagtgaatcaccctctttgccggtcactgaaatacaacctgaggtatctttaaattctgtaattggattgactaacccaaaaactatgaaattgctgggaaaaattgctggatgtgaagttgtggtgatgattgaccctggggcaacccataattttttatcactagctactgttgagaaattagctattcctgtgtcggaatcggaaggatttggggtttctctaggggatggacaggcggtgaggggtagtggaatttgtagaggggtgttattgagtttaaatggtggagttgaagtggaaacagattttcagcctctgggtcttggtaattcggacgtgattttgggtgtacagtggctggagacgttggggacagtggagagcaattggaaaacacaaacaatggggtttgaaatcgagggtgtcaagttcactttgaaggtgacccatcactggcgaggtctcgaatctcactcaaagccatgatacgtaccttatgtaaagagggtggaggtttgtggcttgagttgaaccagattgagcattatcaggagaaaacaccgcattcatcagccttacctgaaattccagttttcttacagagagtccttacccaatttcagtctgtgtttgctacaccagaaggcttaccaccgataagagaacatgaacatgcaatagttcttagagaagggtgtaatccggtaggggtaataccgtaccgttatccacagttccaaaaagatgagatagagcgcctcatcaaagaaatgttggcttccggaatcatcaatccttccacgagccctttctcgagcccggtgatattagtgaagaagaaagatgggtcgtggcggttttgtgtagactatcgggccctcaataaagaaacggtccccgataagtatcccattcccgtgattgatgaattgttggatgagcttcatggggcaacacttttttcaaaactcgacttaagggccgggtatcaccagatccgggttaaggccgaagacactctcaaaacagcttttcgcactcatgaggggcattacgagtttttagtaatgccatttgggttgacaaacgcgccggcaacgtttcaatcccttatgaacgaggtcttcaaaccattcttgcgcaagtttgtcttggtatttttcgacgatatattggtctacagtagttctgccaggaacatgaggagcatttgaccttggtgttgcacaccctagcagctcataaattgtttgtgaatcagaagaaatgtgattttggcaggtcggaagtagcatatatggggcatatcatctctggtcaaggggtggctgtggatatggagaaggttcaagcgatggtggaatggccccttcctaaaaacctccgggaattacggggatttttgggccttacagggtactaccgcaaattcgtacttcactatgctcatatagccaagcctttaactgatcaactcaagagagatgcgtttgggtggtctgaggcagcaactcaagcctttgaaaagctcaagaaggcgatgatcacatcccctgttttggcaatgccggacttccaagagttgtttgtggttgagaccgacgcatccgggtatggtctgggggcagtgttaatgcaaaacaaccgacccattgccttttacagtaagttgttaggtgcccgggctcaattaaagtcgatctacgaaatggagttgatggccatctgcatggcagttcagaattggagatattatctgctgggtcgacatttcctcattcgtacagaccaacagagtttacgtcatctcactcagcagcgagaagtaagtactgccttccaacgttggatgagtaaacttatggggttcgattttgaaatacagtttaagccggggtgtgccaaccgggtagctgatgcattatcccgcaagacagtgggagaggttgaattgggtgcgctgatattaactcatggggtggactggaccgacttggagcgtgaaattgaaggcgatcctctgttgtgcaaaattaaacaagacttccacgggggtgctattactcctgtgcacttttctttggtggacaacaagctgttgttcaagggtcgatacgtgattcccagctcttcggtttttattcctaccttgctgcgagaatatcacgattctcccattggagggcattcgggggacctcaaaacatatctcaggatggctgccgactggtattggaggggcatgcgcaaggatgtggcgcggtatgtgcaacattgtagcgtgtgtcaacaacaaaaaatgtctcaacagatgccagggggggtactacaaccactccccataccttcctcggtttgggatgacttgtcaatggacttcgtggaaggcttgccatcttccaagggggtaaacaccatcctcgtggtggtcgatcgtttgtctaagtacgcccacttcctcccactacgtcatccatttactgctgtgtcggtggcaaatgtgtttgtcaaagaggtggttcgtttgcatgggtttccttcctccattgtttcagatcgggatcgaatttttatgagtgtgttttggcgggaattatttcgtttacatgacaccacactcaaacgaagtaccgcgtatcatcctcaaacggatggtcagtccgaaatcgtcaatcgagctctggagacttatttgcgttgctttgtgggggaatacccgcgctcttgggctcagtggcttgggccgaattttcatataatacttctcctcatctctctaccaaaatgaccccgtcaaggtcctttatggtagagaccctcctactgtgatacgggttaatcggggagcctcacctgttgaaagcttggaaaacatgctccaagagcgagacgcagtattagatgccttgcagattaatctgattaaagctcaacagaaaatgaagagtagtgctgatgctacaagaagagaggtgcattttaaggtgggagatcgagtgtacttaaaattacagccttaccgtcagaaatctttggcttaacgcccttatgagaagttagccgcccgtttctacggaccatttactattttacagaagattgggcaagctgcatacaagttacaacttcctgtttctagcaaggtgcatccggtgtttcatgtctcccaactgaaacaggccgttggttccattcccgtttcagccactattccagagcaattgtcttctgacttggagttagaggtggaacctgatgaactcctcgatgttcgtagtgtttctagaggccagcacacttacttggaagctctcattcagtggcagggattaccatcattcgaagctacctgggaagatgtggctgctttccatcaccattttccatccttccaccttgaggacaaggtgaaactttgggggggtggtaatgtgatgcaccaaactaccactccactactcacctattagaggcgtaagaaaaagggggtaaatcaggaatagtttacaaattctgttgaaaggaatattttgtaattatgatgtcagaggttgttagcaaaaaggcagtagagtaacaataaaaaggggaagggaggagagaagaaggtattgagatttttgtaaggaacttggcccttgggagagttgggagcctctcgaaagctcaccattatcttgtgaatattttccttcctggttatatacaagaaccttcctctgtcaatttcttttctctctaatcttatttcttattctgttttctggttgccattgtttgaagttgcttgttgtgcttgagtaaatacgtgaagtggtgaaacccatctgaattcatcacatctattccaagtggtataatacaagcttgtaatccaaatctaatgagaaatctaagttatgaagaatttcaaaagaactaagtacccttgttttggatgcccaaggatttacttgccgctcaagttaatgctcaacgtgcaagatacaacctctttagtatcccaaggtagtttccataagaattaattgagctcaaatcaagaacaatatttttatgtattaatgtgaacacttcctgaattatattagatatatggtctgaaggttggaagaaagattagcttttaattttaagtttgagatagtttttagaatcgaggaaagattagctcttaacttgtaaactaaggattgctttataagtaaaacattagttatggaactcttaaaattggttttgaacatttctagttaaaaatcccatgtaattctcccaaactagcttaaaatctcacatttcacaagctaaggagagacaaatggcgttctcttgtgaaacaatctaaaattttcattaggctactgttttcaagtatttatatgttagaagtgccgcatataggtacataaaataagtttacaaacacaagtaggaataaggaaaactaaaagagaaacttcagccatacaaaaccggctgaaatcagctactactttctactttctagcttcaaaatctgattgcaagtctcctttaagccaatcaccaatgaaaacctttcctccacatgaagtgtgctcaaatcaagagaagaaacccatcattcgcctatagctacctgggtcagatgaagatacggcaaaaaaaacgctggaaatcagtgaaccaaaataagcaccaattggatgctttctgtccttgctacattttcttctcataggactacttcaagccatacatgaataagcagttagatccagctcctagcatccatttgatcgtacaaatgagctccaaaaagataagtaaaaccaagcagccaaaacctaattaatactaatgatgaattagttgaatagctaatgacgatgaagcaacactttagtaggaatagtgttaattatgatcaatgctacttaatcttctgattaatttttggaaaaatgtcatatctaccttctgtatacacttattcataactatatcgtattattattatttttaaataactaccttttaagtaccaaaacctaagaaatcaggcacttgatggattccatccaaagatccatttggcggggcccactaactgacttttgattttttgcctttcctcttttggttaatctcaatggttcatcaataacaactcaatcttctccccatttcatcaaatcatccctaaatcagaactttttcaaattcacccaaatgaggttatggaaacctctaccaagtttattcgaccacttttagtctagctcaaagttttacacttgcttcaaaaactaagatttattaactttagaaattaggtttttatttttattttttatttaactttgtaacaatcttaaataactcaggtgctttctagagtttggctttaattgtttttcccttggttatgtgaaagaagtatgactactttctccaagactaaagtagagagcaaaaaatgcaattctggaatttcttgcaaaagaaaaggaacgagttaatgataatgaaaaacaaagaaaatgatgagaagagaggagctgaatcaatcatgatcatgtattttaaagttttttttgctattgaagtgacttaagaagaggaaagaggatgagtgaagacaaacaaaagaaaggataaatagagggaaatcttgggcttagaaaggtgaaaaggtaagaagatgagttagtgggccccaacaaatgtatctttggatataatccgtcatgccactgtttggggcttgcttaagtccatacattacttcactaattttacaaaatttattttcttgaccaagaactgaaaaaaccttcagtggtgatctattaggttttggaagttaaaaggtagttatttaaatgtttttaatataaaaggtagttatttagatatttttaatataaaaggtagttatgtgaataaaagtgtatataaaatgtaattttttgacatttttgccttagtttttcttgctaattcaccttttcaacttgaccaagttgctatgaggagaaaacgagcaattattaagcaaatcgcaacactagcattaatccatggcccatgaaactctccataattagagattggattagcacttagtagaacttcttgctcctgctccaggtttccattacttctttatctaagtgcatcaaaaggttgttgggttatgaaaggtggtggttgtgtatagtcattgtcaaaatgttgttaatgcactctatttagaggatgagggattgaatagttttcacctcgtgacctttcattcctttttaaaaaaattgataatgtgtattggtcctatgactgtatgaatggtaataagctatctcatgagctgttactatcttcctcagagtctaggtagaagggtttgggctgataattttctactatgtgcaattagtttgttggatttggatatgctagttgatataggtcctttcccttgggccttctcttaatataggcctacagtgtgattgaagataaatcttctggagaatataagaacaatgagatggattggttagaggttgatttgttcttttggtgtaagactatttcgggttctctattggttatgttcagacgccagaatatgtgttggtgattgttttccatgaacatactttatccgcagagacatttttcttttttcttcctataagattatatttgtttcctctcttggtgctcatctcagtgtctctactttacgttaaactgttgacattacttgacaatgcgtatatttgtcgcatggtgctcttccctcactccacgtcgaccccatacatcaaaaaatgccattaaagaatattcgaactcacaaccttgtgttgaaagaatggaatccctaccaatgactcattaattcattttctctttaagaaataaatgatttcctcacaaacttttaggctttaagagcccaaaagataaaaacataaaataagatagacatcaacgtcaagattagccttaaatgcacaaagcacatgtcaaatgattgataactactcacgagttgcaactctttgggcgttgcctaatattaattggatctcttttaaaaattgttggtggttatggttggtggagaggaccatgtaacttttagctggtcacaactggtaatgattgtcacttttactgcccataaaaaaatttaaactgttgaatatgtttctggcagtggatctgacaaatcctttacaagttggcgtccattttgttttgccatgtgactcaattataatacgtgagttttattatccaccaggtttggctcactaatttccggattaattcaatctaaactgtctccaaagaaggaaaagggtggaggaggaaagccttcttctaatgaaaagacacgcatacgtggttcgttttctttccagggtggaatgcaggtattagcatgtagctttcattctgttaacatttgtggttcttccagacatacatccaatgctttttttttttcttgctataaccataaacattcttgtcatgaacattctttaatactgttgctgagcttagtgtattcgttcattcatgtaatttcctctcttgaggttaaaatggcatacagccttacaacctatatccataatgctccttagagtagaatccctaggttataacatagtaccacttatcaaaataaacatggcacacactgcaggacaagaagtaaatccacctagagaactgagcacctagtagtaaaagcagcgatacattactaataacagtagcagggccataagagtagtaaatgggcctcatttcaacactccccccgtaatggtgagagagaagaagcagtctgaactcccagcttggagagcaaaatagagtgttgctgaacagggagaaccttagtgaaaacatctggcacttgatcttgagatggaacataggtaggctgaataaccccttcttcatttgtattgtccctcaggaaatgacaatctatgtctacatgcttggttttctcatgatgaactagatatgctgctatggcaagagcagcttggttatcacagtagataggagtagcactggactttttaatgcgaagatctttgaggagttgtttgatccacatcacctcacacacagcaagagccatggatctgtactctgcactgaccacaagaaattgcctctttgactttcaagatacggggggagtcaccaaggagcacacaaaaccagatgtagaatttacaacacccatcccattcactatcacaaaatgctgttagttgagcactagacttgttcgccatgagaattcaccctgttggcagcttgaagatgcacattagtggggcagtgcataaatttgcttaaatcatgtatagtgaaggcaatatcaggcattgccttgtaatagtgagataaatgagcttccccatcaatttttgatacacatcaggttgttgaagaggatcaccattgtcagcatagagcttgacatgtgagtccatacgaagcctcaatcgtctgcaatttataaaaccatattcatcaacaagacccatcacatacttctttagagataaaaacgatacttcactacactgatccacttcaatcctcaaaaaatatcttaggccacccatatctttcatgtgaaattggccagcgaagaaactctttgcttcctcaatagttgctaaactattgccagcaagaatgaggtcgtccacatacaccaatatagcactgaaacagtgagagttttgcttgaagaatagagagtagtcacacttggattaagtgaatacattttgctttaaagcagtgttagcttggcaaaccattgcctcaaagcctacttcaagccataaagtgacttaagcagcttgcacaccttagttcatttggtgtcacttctgccatcagtacttagctccccctctccttgaactttgatcctgttacatgtttcactatatcctggtgatagcttcatgtatacactatcctacaattcaccatgcaaaaaagcatttttaacatccatttgtttgcaagaaccaaccctctaaggatgcaacaacaagcatgtggtcatctttgctacaggggtaaaagtctgctcataatctattccatatctctgtctgtcacccatgattacaagccttggcttatgcctattatttgtgccatcagtgctgtattttgttctgatccatccatgtgagggatggctcatttctacaaaatcctagttccgttaggatttgtgttgttttcctaattctagtaggaataggactcctaaaatcctaatcctcctagttctgttaggagtttaaaagttttagtttgattgtaattctagttgtgttagaaatccaaatcctagattcatgtcacgtatggttagaacatggctagtaggataatttgtcttgtgatgtccatagccttggcatttgtggcacctaactttcaatagcttgtcttctgtctccttttctttctccttctttgaggaatcaacgtttttagagctatctaaaccactagcatcaatattaggtttaaaagtgctaaaagatttcgaatagttcttacttgcatacaatttctttttctagtttatgtagcgtcaccagggaacaaaaactcggccgttccgttctggaacggccgctttgtaacggatttcagagaggccgttccgttaaataccgttctagaacggtgatttggaattcacaccaaactcggcgcgatagcgttacgtaacggtgtaacggcgttccagaaccgttacaatcacataacgtccgttatttgaagaagaccagttcttttggtggaggaagaagaagagccaacgcaagatctatagatctgagttaaaatttgaaaataaaacatgtttttttatttaaattaaagcttacagaggatgtagaactcaaattcgagtaaacccctcctttaatttcattaggttactgcaaatcgaaccctaaattgcaaaccctaatttcgaaaaaaccctaatatgcattgggatgcaacgctgcttctccggtcatggcagagaaggtcgacgagtcatcttcggctgcttttagcactgtagctgccggtggttggcttgtttgcaggttagtgcttgctggttttctttctctcataccgatcatcttcttcttttctctcttctctttttcttttttattgtgtgactgccagtcacgtgataattgcaactcataaagtatctctttctctctcttcttttcatccctttttatttttctttcccttttagtttttattccctcacgtggaatcacctaattttcatccttttttatttttttagttacactcttacacagaagtatgttcaaatatcattatagtacctcaaatattgtatttataagagttttggacataatatgatatagaaagtaaaatagaagaaaaataaagtttaaatgtcacttgtgtgatttttttaaaaaaattcacgccgcgacggccgcgaaacgttctatttcccgttacaagccgttcccgcgataacgcgaccgttcccgcgaacgcgaccgcgaccgcgttttttttccttgagcgtcacatcttgcaagcttcttcaaaggtgagttatgtgtacaactccaatttctctccaatcccctccgtcctcatttaggcctccaaggaagctacttaaacattgatcttcaagttcatcaattttccaaagaatggataacttctcgaactcctttatgtaatcttcaacggacatattcccttgtttaagagtagaccattccatgtacaagctttgtttgtagttagaaggaacaaaacgtcctcttaacaactttttaagcttatcccaagtagagattttgggtttattagctttcacacgctgcctctttactccatccaaccaaatagatgcatatttggttaccttaagcacggccaccttgtatttcttttcttttggtgtctcttaatcccaagtagagcttttgcgtgtgaaagctaataaacacaaaatctctacttgggataatcttcttcttgtttccgaaacaactaattcttatggtagttaggaaagcaagaatggtttctaattcaatagggaatatattaattattattagtttaagttaaatagtgcacgaatctaaatagattattcgtctcaaaatctcacttaagtatagatttgtttggacatctgagggaagaagaagagagcgagataaaggagaattatcactcaatgaatccatatcccgagttttcccatttacttctttgaaagcaatatagttcacgaggtcttattatcagtctatggacataagagtaataatttaagggcaaaaactatgactttatgggtttaaactgatacatgttctgttaaactgatagatgttctgtgttaaaccgatactcatatattcctggttaaactgatagatatatgatttaaattgatacccgtctcagtcatgtcttggattgagacggtctgacacaagactttttgtgtattatatatctgattagaataaatttatcctgtttactaattattttatcttctccagacacttgttgacacaatatgcaatcagtttggtaaagatgaactcaaactacagtgcaaggtcctttcattgtcctacagtcataaggggatcccttcttcagaaaattgggtcgtgtcttctgtgtcaaaaaattccattgaagatcaacaatatgatgctgtcatcgttaccgtgagttttactttgcttactgctattgcaccaatctttcttcttttgacacactgataatggcaatgctgttgtggtttgaagccatgttatggggttttagggatatttatggagtctgatctaatatgttattggataaaattcagatctgtaacgtgactcaatgagattgaaaaaaattgaatcaagataatggattggaaaattaggagctaacctagggtctataagcgatccacttggagtctcataccaagcaggtattcgacattttaggtttatattgctgctatggctcatatgggagcctacatagggtctggtgcttattcctttttcttttgtctagttttggggctgcacatttctgttgtgttttgatatggatagccatcacctgcaattgcatggaggctgaactaagttctataggggagcaaacagtatctgttggaaatttattttcatattgtgtttttaaatgctataatccaaaatttgttgttcccctaaaatgcctaaaatacccttatgtaactgctccatctgtcccttaatagacttcccatttctccaatgcatgtttgccaatacacattttgtattgttaatatcaaaaattacatattagtaaaaattataaaagtttgattttcctaatgtacgcaatgagacgaatcaaacaagacgccatatgactatgttttttcttatacttcctatgttttttaataagtgacatgttttccttttagggaaatgtcacaataagtgacacatagctcaaagtagtaaaaatacttctcatttattacatctttgccattatttaattgtttcacctacctactttatccaatactcaaatttgattggttgaacaattggtcccaactttctctagactccttggtattccctttcccccactttctctctgtgtcacttattaaaaaatggaggacgtatattggaaaaaaattggaaggttttcttcacttatgaatagtggtaaaattagagatgggaaggctattttgggatggatggagtaatatttaaatttttaaaataatgtcattgttttagtgatgaaataaaattcaaggctattttttctagtaattatgttatctgtacatcaccacacgtatcgcgtgcatataagactagtttgatgatattccaacactgttcgaaggaagtcaggcatggaaccatgtttgcttccatatgggaaatattttgcttactctccttcaaacatctacctcattatcccagaatgattgatcgaatctaatacaaatatacaattgatcatatgccaccagggaattacatcaaattaaatttttatagaaggggaatcagtcatagcctcatagggaacgaataagtgatactcgccagtttctttcctggttacttttcctcttctcactagccatcctttatgtatgggtatgctgcatcattcctgccactggttgggactcccgtttgaactatggggggatgggaaagctaagccatcatcttcaaattgagtttcttgagaatgtaagacaccatctgtaagatgaatatagtgcactctatagtcaatgtcatgatctttatgggtttatctgctgaaataactgtgatatacccagctctccatttacaaagttttcctacatattaaactcttgcccgcaattctagaacttcattgtagaacttttcctacataagcatcatttgtcttttctgtagtaaaagttagaaagagctttattttagaacattcgtttttagttttctttgttgttgattactccgccacttttaatacttttatgattcaagtatttgacaaaatcatgtaatttaggtcctctgctgcatgcagtctataccctctctctctctctctctctctctctctctgtggttgtgtcttacttgttgagttactaactccagccattacataaagtaggctggcattatgatgagcaaattactcaagaccacatgttagctcctttttcttttctccttattctgaaaggcaaatataggtccatcttggtgcttctcatgtcataagtaagctgaccccctccttttccagggaataggacaataatccaaaagtgagggttttacatgttgggatttgtgaagtttcttattttacttaatagccgagtcagtgttacaatacatagtaccgtgttacaaaatagtatgtaacaccaagcatgtttatgtgcaaaattgtgcaagactttgttgctggcacgccaagggctgttttaatgtagtttacttattcttttaggtttttcagatgacaatcataaagggaattaggagtgtttttattgtagtcaatccctattgtgctacaacgataaaagaaaaaagcacaagactagaaggagaagtaatgtctaggaaagactcctcacctggggttgctagtcacctacacatcttagaaggcatcaaaccaaagcttattcccctcgactgttttcgggagaaaagaagacaaaattgtttctaacttatactttaccagtttcactacagcatcagaaagaagcaaaatatgctcccacaacacggcgaacctagctttccagatgtgataaaccagaccagcaaaatgattattttcactagagctttgagtctattttttcggtttttccccttcttcctggtaatgtcacgccaccaagccatcatctcaattttttgagatttgacgtaatcgctcaaatagctgagtaagacacttcttgctctaaatactaataaaaaagaggtgaatgtgggtctcagccatgttactcaaatcggataaagtgtctactcttattagggtttttgggtgttggactcatccatttttttttgtaaaatgtcaagattttggtttgaaatgagagattcaagtgtcgtgacatgagtcggcacgcaacacttaaacgtgtcgaagtaacagagggtctcagacaatcaactttaatcaatcacgaaccccaaaatttatgcaacctttgctcatattcagtctctgtaaagcactcaactgcagcacacccacccattcgcttcacctacagcaggagggcacccaagtaattgctatgatgagcgaattattctgttttgccttgctggaatattgctgttagatttgctgactcactggcagttaattatagtcagagaatgagaaatatcctgtagagagagaaagggtatcttttgtatttagctctataaatagctaaggaagggaagggcattgagagtttatgatattataataggagagatttagcctctcgaatgctgataggagcgtagctcttgttggattatcaatactactctgtttgctctatctatttctactcaggttccttcttgtacagtggatccctgattggatttacttcatcaaccagcagataaaattatttgtaggcacattgaaaccattccaaacctaatgaggccaaagtttatcacaaagaatataggagccaaatgtaggcaacagataagagtataattgccagaagttgaagactccaggtattgttcagaaaccttaatgcatatcatcattctgacactagattttccccggagccaactaacaaaaatgaattaaagagattaaggctatgtttagttcacctgaaattttctgatctgaacttatctgatctgatctgaacttattttttctgatctgatctgatctgatctgaaccaatctgattacaagatcttatcttttagatttttctcaatatataagaaaaaatatagtcatgtggggtcttgtttgattcgtctcaatgagtactttattaatattcaattattataatttttactaatatgtaatgaaagatataatgatttttaaatataagcatgatctgaactgatctgatgtgaacttattttttctgatctgatctgatctgattagatctgaaataagcaaaaataaggtgaactgaacatagcctaagcaacaattgagggaaaataagatcattatggctaagataagataaatatgtaatgataaaatcagagtaattatatcagttacactctcaacattcgtcagattgaggtttcctcccaaaatgccaacccacttttctgtattttcacgtccttctctctacccttctaggtatatattacatcagctgtaaaatttttgaaccaactagtagaatactgatctaccctcaactgcctcactttctcattttttctgggcctttttctctctagcacaagtccacataagtgatgcatagcagaaatataattccactagtcatcctcaatattgatataacaaacacatcacccacatattatcatttttaatcgctgcatgcgaggcatacttacccaccaatcaggatatgcataacagcgttcctaattccaaaaccaccatatatcttgggtttgcaactctcatccctagcaacaaggggactttctgaaaaagtggcagattccgcccacaagtagtttgtacggacacctttattatattattaatatcatatttcggcaacacaaattaccagcccagtaaaacatgaattgacatgagactaacaaggggcccaatctaatatcgtacgtctgtactaagcaatgtataaaaaaaagctcaaggtgcattgatgcaatagggatcctaatgtgcataggtgcgcctcattgaagtgaggcaccactaaggataaataaaaaagattgatgtaaaattaaattgtgcaccttgggtgcgcctcgatgaactttttttgtgtgcctaagtgtacctcaagtacgcctcattgatatcgcctcgcctggcagaaaacgagcttgaccccaatcgccttgctccccaccgcctaggcgtgcctcagtcacactttttaaatacattggtattaagtactcagaatggcaaaaagaaactttgggcattaattagacatttcactttttgtgcaactatttgtgacttcagagattgatatgttttctacattacagacttttgtgatggctgcatggtctccactgtcaaagaacattagtttaagtagaagaaatattgctctattaccttcctccctctacaaacaaaatcctaaaatgtggttatgtagtgccaattcaaacttgtagatgcatgactaatgctttcattatgctgtgggtttttatactatgattcatgtccaattacataacaattagctggagtcaggatatgtcacggaaattttaagcctggcaggatgattgtttatattttctctttttcggtgtttaagtcaaagtaaacttctaggctgctcttttataggctagttgggctgttggggagatctacacattaagtgtgaagaaatcttgtctaactccagtttggttgagaactgtaagctgtcataacatttgttgcatgatgaggccttgtgggattatcatgttagctgtaaactctaaacttacttgaaatctagtgttgtgtctccttatttctgtagtcaaaattgaaccttctgtacgtttttgatacctgcgactagaatgatggaattctgaattactgatactattacaaccatctgctaagaacgaagatgactcttagctaatttctcagcagatttagagaaattaagaagaattactaatgaatatttaaagagaaaactaccaagatatgattgtattgatgaaaaacaccaattacaacctaaccaacattcgagaggttggagctctcccaagtaaccatttctctcactaaacttatcaattttcaagatgccttttccattctcagttcctctatatttatactactccccttagcaaactacccaacttattccccaagtaaactaaagagataatatctaaaatacccttccccctacaataatattagttcttagcattaccggccccctaaacttccaccttgtcctcaaggtgggtcgtaatcatcactaaattctgggcctctactcgtatattcagtgtcttgcagcccttcaggccccaagcctaggttatgcagctcgtgttgcggctcctcctcatatagttctctggctggagtgagtgcctcaactataatgaaaaagtcctggaggtggggaaggaaggagtgtctgaaatggtgtggtgtgctgctggtgttatgggcttgtgcctgaaagttttgggtttaaagagatggagtggagaagagtggagaagtgactggagacgtaaaagaaggaatcataatttttgtaagtggtgggttgaaaaagttggtgggaagaattgtttttataaaatgtagtgtaatggtcgaaaaatgggtggagtaagtatggtttttggctggggatgtggtactgggttgaaaataaataggtctgagcttacttgtaaaattggcctcaacatgagcaggcccaatatcttgagccaattccccaaaagctggcaatagagcactcttaattgcattgttgtgggccatcgggctccaaacatatattcggaggagccggacttctttggtgatgtcattagcttggcccattgcacactttcccttaacagcctcaagatcttttcccacttttgtaccccaaccacgtggcttcaccatcctttctttcttgcttttgtcacttttttggcaatatacgagtttgtccttactaccctcatcttctaatgttggcttcctcaccaagcttaatttctggaattttgtccaccaaatcccaccacccatcgtcaacaccatacctatctacaccggccaagaagcctggtcctccacccgaattttcgccacagacaaagcctgaacaaccgtcagttctctcaccggagaagttcacaggtccaccacctgacccactagttgctgatccacccttcacaaatctccctcctctggctgccacaagtagtggttcctccgtaatactcatatttctcgtccaagagccctggaccaccaccggacccacttccaccggcaccaacttgttcaaatgatacttctctttcttttccaaacagcctacttggactggaaaaaccactgcgattgtagcctccgccagatctgtagcctagtgcacctaacgtgcttccaactgcaacccaatagggatggaaatggatgggattcggggagggtggagcatcacccgcatccgtcacccgcatccattcgctccacccgctccacccgcatccatccatccgtcacccacgggtgaaacgggtgggtcggtgataaacgggtggaaccatttagggggtgtttggtatcatgtttttttacaaaagaaacagaatcaagtaacaaaatccgtttctacttgtttggttctatgttgctcagactcgagtacccatgtccgacacgggtacgtgtccaagtgtccaactcagctattttctagaattttttatattttttaacccaaaacaaagtgtccaagtgtcccacccatgtccgactcccgaggatccgacacgggtacttgaggtgaaatgaagagtccgagcaacggaggtttggttagtgtgtaaagtaacaattaccgttacttgaggaaaacacatccccccaagttgtttccattcaaaaacctaaggaaacaaataacgtttcactcctcaaacaagaggaaagggaatgggttatatttatttccattccattaggataccaaacaactaataagggtaacacttattattatcctttcccctccttatcaaaatcctttccattccgtttacggtattcataccaaacacccccttagtatattttctaatgaaatttgtgatatgatatgcatgatataaaataattctatcaaaaatataaaaagtaagtaaacttacatgtacaacttaatagatgggtgatgggttggaggttaaacgagtgatggatcgggtgacgggtgaagaaattctcacccaccactcgctttccatccatttaaattaggtttttcatccatttaaaaaaccgggttaaacaggtgatgtatgatccatcacccatttccatcctcaaacacatcccgatttgtttactgcaccaccagatccaccagtataaccacccgaaaaatcatcatgccttctactagccttgtaacctgctcccggtgagaagcttcttccacaagtggtggtcgctggacctccatctccttcttccccaaaaaattttccatgacacccactcgacccttcatctgtgacaacctcttcttcgtccacctctgaagttttggggtcgtcttcctcctcaagctcctcttgaagtaactttaacttccgttggatgggagagaacgcttcattgattatcttcaccagatcttcttgaagtttctcgaaactttttctcacgttttcctctacctctttcgtgatttcctttccgatctccttcatttttagactaggagctcttgcgattccatggcagatttctttttttaaaacaagaaaatcaggcacttaatctcccagaatagtggtgctctgataccattttctaagaaccaagatgactcttagctaatttctcagcataacaacaaatttagagaaattaagaagaattactaatgaatatttaaagagaaaactactaagatatgattgtattgatgaaaaacaccgattacaacctaaccaagaggttggagctctcccaagtaaccatttctctcactaaacttatcaattttcaagatgccgtttactactccccttagcaaactacccaacttattccccaataaactaaagagataatatctaaaatacccttccccctacaatattagttcttagcaccatcaaactgggatggatggttttgtaaggttccaatttacttctccatcaaaatattttaggattttttatctcatgtattttagagtttcctcgtccctttttatctgataagattcttctgatgatttgattttatggtaggctccaatcagcaatattaaagaactgaagattctgaaagctggagttccattttcacttgacttcattccagaggtttgtatttttatagtggttagacatgcttcccctagttttcaaagtaaaagcatccttgttgtgacgatattttttcccttgtttttgtttttattattatcatcacttatttccattttctattttccatgctgataagatgttcatcaccataatcttgtggtatcagaagtgtttagtggagtttattcactacacatgcagttgttcttttgccatgaccgccattcattttctcgtcaaaacaaatctatgaagtttggttttcagactcatggttcttgtagctcttgtgaatttttttttcttctccttgcatgcattcttcaaattacatattgcatataccaggtgctctcctttattttatatttaatttttaaaattctatcatatattttttaatgtcaaacctcaaactaggggttcactgcatcttaggcttaccaggctaatatttctttacttaaccttttccctttatatttgctatcctcttgtgtagtaatcaccataagaagggtacaaactaaattaccctcccattcttttgtatcattctgaaatagtgtcacagagctttgatttttttgccctcatttaatctggcaaatgttctctctatttttttttttttactttcttttgacgggattctcaggcaattgttacggggagcagccagtcacactgtttctgtttattatgcaggtgagttacctgcccctctctgttatgattactgcgtttaagaagaccagcgttacaagacctcttgagggcttcggagttcttatcccttcgaatgagcaacataatggactgaagactctcggtaattgtctggttcacgtgtgtagcgaatcagattttcaaaccctgatttcgtaacattgcaggtactctgttttcatctatgatgtttccagatcgtgctttctccgatatgtatctctatactacctttgttggaggaagcagaaatagagaacttgcaaaagcttcaacgtatgagatatgcaatgttttaaatgtatgctatagtcatcgtttcaaccttttggtgcctttttcttactaatttatcctcctggtttaatgatcttagggatgaattggagcaaatagtttcgtctgatctccaccagctgttgggcactgagggaaaacctacttttgtgaagtattgatatctttcacccaacttaacatgatttgtgcttataatatgttaaataaagtaactgaaatcctgaaattaagactacgaaactgtatggtgacagtcatttttactggaacaatgcattccctttatatgggcacaattacgactcagttctgagagcaatagaaaagatggaaagagatcttcctggacttttttacgcaggtaatctgtcatttgcttgttgcgataaagttcatgtacagttggcatatcaatcaacttgcattctttcttgctaactccaaacaatcaggatcattaacttgtaggctgcagcaacagagagtatctcccaagttgttaggtttcatgtaacctcgtcgctgagatgaaatttccgttggctaaaaagtgaaagttttgtattgatgttacccaaaacaaaagtattttgcatgttgcttgaagttttggttgtttcagatagtacatcctttgacatgaaaataaatggaaaagcgtatgtcaagcaattatcatctagtttctttgtttctagatactagccgcatttgatcccagatcatttttgaggaagtcagctgaaataccgtagctatccttcagttttcataataaaactttaatggatctgatgtacagtaatttagtgtgcaccgggttaataattgatattaacttcatatagtgagtcttataaagatataatgaacttatatacaatatagtggattttattaatggaaaacatatagtgaaactatatgcaatatagtatgatacataaagacttagacaacaagagcattcgaaattacaaagaacaaaggaaagaacaattgtatcaaaccggttcgaatgaacaaacaaccaccacttccacaatcaatgtaccaccaatcaagactaaactataacaatgagcttctagtttaagtctactttgagttttaatcaccaattcaacgattagatgatcaaaattgcaaaggttaagagttggtcaaacctaaccaagagttacactaggcacatagctttgttaggagtatattagtttatgaattctagttaagttagaaatccaatacctagttggattaggattcctaattggattagaattatagtttagttagaattctagtaatagtaggcgtgtgattaggagatataattagcttaattcttatattgttagtttaattcttatcctcgttttaggtttatctttagtcgaacttgtaccctatataaggggcctttatttcattaataatatagtttattttgagtttaaacctttacttgtgattgtttgcttgagaggttattaatcgaaccattaataacttttcaggattgttaagtttttagtgttaaacatcttaatttcaggagtgattttaagagtgtttagattcttgtattcaagtttcaggactgatcttgaatcaagaaatatccctagtttcgactaatatcataagtagttcgaattcttggagtcttttcttcaagattcatattcataacttgattatttagacttcttggttttgtaatcatatcaagtggtatcagttttccagggaggagaggatacaaagggttctctttgatcaaagaagatccaagggcatcaataagaatgacacttgcaataagttcgagtgatacaaacaacttcaagactcgatcttttgctaccaagaaccaatcttgacgcctgaagattgttaggacaaaggataagaagtgtttctacatccaagattgcattctttacgtccaagattgcgtcaagatccattctttaagttcaagaaaggagtagaaagcattcgaacactacttaaacatgacatccgagatggataagctggctatggccatgagtgccttggcacaatcacaaactgagtcacgcaaccacatgggtaggatggaggcacgtgaccgtggattgaaactagatgactatagtggagatggcaatccagaagacttgttggagtggatttgccaactaggcaaagtgagtgattataggggctttgatcacaagaagagattcaaggttgcttccattaggctcacgaagtatgctggaatacggctcgaaggattgcatgcacaaacttcttgcctaatgactatgaacaaaaacagttcataaggctcgcatcaataagccaaaacacacttagtgtacacgaatacagcatggagtttgacaaattagggcttatatgtgacatagaagagaaagagcaatacaagattgcaatgtacattaaagggttgaatcgatatatagccaagaagatcgaagtctcaacttatcacttctttgaggatgtgactaaattggctaagaaattcgaagagcatgacaaagaagaagggcctaagagttcttacacacctaagtatgactctagtgctaaagggaaatcaacagttccctactcaaggtggtcggaaagacctaagaaccccactacacctaaggaggacactagcatggagaagacaaaagtggccgtacctaaggagagtttaattttgtgttttatacatctttgcttaagagcttaacaattgaaactattaataacttttcaggatggttaagtttttagtgttaaacatcttaatttcaggagtgattttaagagtatttagattcttgtattcaagtttcaggagtgatcttgaatcaagaaatatccccttgttcaactattataattgatcttattcgagttcttggagttaatttcttcaagattcatattcatacttgattattagacttcttggtttagtaatcatatcaatatcattagcattaatttacccccagggagattaagaaaggattagcctaatcaaggcgcttaagaagtttttaggaaaaatcgtgcttgttaagcttaagaattgaacttctttcaccatttgcccttgattctcttgttgaactagaagatcttggttcatagtagatgctcctgcatcatagtagagcatttaattttaattttttaacatgcacgaagatgtaggtagtgtagtatatatcgtgagacgtggtttaacatatagaaagatgtagtttctgcatgatatagtgagtttttgcatgatatagtgaatgtctgaatgatacagtggatcgttccgaattgttgtagtttgtatgatatagtatttttgtgaatgatatagtgagtttcttcatgatacaatgggtttctgaatgatatagtggattgcttagaaatgatatagtgagcttttgtatcatgtagtaggtttctatgtgatataggttgttaaaagatgatacatgcttttggcctcatgtactctaatgttaacgtgaacccggtccttgcaagtcaattgcagttttttcaatattaagctatttttttttttttttttttttttttttttttttttttgtacgggaatatttagcatctttaccacaaacataaccatacgaatattatgcggaaattccagtctgaagtcttaacttttcaaaattaaaagcttctatattatttttggaatgaaaaaaaatgagctatggcatgttattttgaaatacaatgagtctcaaggtgcatagtggcttcaattctacgaataatgaatggactactgatttctaattttttgttccgggcttttgcattaggtaaccataaagatggactctctgtgggaagaactatttcctctggatacaaagctgcggagcttgtgatatcctatctcaactctacttaagatgcctaaatgatcgaggagactccgtaagtcctttctctgattctatctttgaactgagtggaaacacgactgtggtctaaagtagttgatgtctcagatatccagaaatggcgttagtgatattcaggagctgtccattgaccctttgattcattgttgcagtttactgaaagttgttagctggtctcagaaaaacgaaaggaaaaaagggggaaaacaaaaacaaagaaacgtagattgtggtgttaaaatcaagaattccagagatttgtaccttctttatcagttgaattgtttacagtgtgaatcaagaagttagctcgaccttcttttcttgtgaatggtaagatttcgtgatcatcaatacttgattgtgctgtttgcaacttcaacggtaagatttcctgatcttacagtttaattgcttgtgctgtttgccactt

SEQ ID NO: 14 - DNA, 1575 bp, synthetic construct
  misc_feature 1..1575: note = R126L mutated Beta vulgaris PPO2
  variation 378: note = n is any nucleotide
  source 1..1575: mol_type = other DNA
atggtaatgctatacgattctcacctctcaggagtctcaactcatcttcaactatcgcaggcatttcccaggaagaacccattaatggccaaagtgtctgagccgggtaaacccacttctgctaaaaggattgctgttgttggtgctggtgttagtggacttgctgccgcatataagctaaagtcccatggcttgagtgtgacattgtttgaagctgatactagagctggaggaaaactcaaaactgttgcaaaggatggtttgatttgggatgagggggcaaatactatgatagagagtgaagcggaggtcacgagtttactcgatgatcttgggcttcgtgagaagcagcagtttccaattgcacaaaacaaactntacattgcgagagacggtcgtcctgtgctgataccttcgagtcccattgcacttctcaagagcaatatcctttcagcgcaatctaagctacaacttatgttggagccattcctttggagaaaacgctatgcttctaagatttctgatgagcatgctcaggaaagtgtgggtgagttttttgagcgacattttgggaaagagtttgttgattatctaattgatccttttgtcgcgggtacaagtggaggagatcctcagtctctttctatgcgtcatgcatttccagaagtatggaatattgagaacaagtttggctcactaatttccggattaattcaatctaaactgtctccaaagaaggaaaagggtggaggaggaaagccttcttctaatgaaaagacacgcatacgtggttcgttttctttccagggtggaatgcagacacttgttgacacaatatgcaatcagtttggtaaagatgaactcaaactacagtgcaaggtcctttcattgtcctacagtcataaggggatcccttcttcagaaaattgggtcgtgtcttctgtgtcaaaaaattccattgaagatcaacaatatgatgctgtcatcgttaccgctccaatcagcaatattaaagaactgaagattctgaaagctggagttccattttcacttgacttcattccagaggtgagttacctgcccctctctgttatgattactgcgtttaagaagaccagcgttacaagacctcttgagggcttcggagttcttatcccttcgaatgagcaacataatggactgaagactctcggtactctgttttcatctatgatgtttccagatcgtgctttctccgatatgtatctctatactacctttgttggaggaagcagaaatagagaacttgcaaaagcttcaacggatgaattggagcaaatagtttcgtctgatctccaccagctgttgggcactgagggaaaacctacttttgtgaatcatttttactggaacaatgcattccctttatatgggcacaattacgactcagttctgagagcaatagaaaagatggaaagagatcttcctggacttttttacgcaggtaaccataaagatggactctctgtgggaagaactatttcctctggatacaaagctgcggagcttgtgatatcctatctcaactctacttaa

SEQ ID NO: 15 - protein, 524 aa, synthetic construct
  REGION 1..524: note = R126L mutant protein of Beta vulgaris PPO2
MVMLYDSHLSGVSTHLQLSQAFPRKNPLMAKVSEPGKPTSAKRIAVVGAGVSGLAAAYKLKSHGLSVTLFEADTRAGGKLKTVAKDGLIWDEGANTMIESEAEVTSLLDDLGLREKQQFPIAQNKLYIARDGRPVLIPSSPIALLKSNILSAQSKLQLMLEPFLWRKRYASKISDEHAQESVGEFFERHFGKEFVDYLIDPFVAGTSGGDPQSLSMRHAFPEVWNIENKFGSLISGLIQSKLSPKKEKGGGGKPSSNEKTRIRGSFSFQGGMQTLVDTICNQFGKDELKLQCKVLSLSYSHKGIPSSENWVVSSVSKNSIEDQQYDAVIVTAPISNIKELKILKAGVPFSLDFIPEVSYLPLSVMITAFKKTSVTRPLEGFGVLIPSNEQHNGLKTLGTLFSSMMFPDRAFSDMYLYTTFVGGSRNRELAKASTDELEQIVSSDLHQLLGTEGKPTFVNHFYWNNAFPLYGHNYDSVLRAIEKMERDLPGLFYAGNHKDGLSVGRTISSGYKAAELVISYLNST

SEQ ID NO: 16 - DNA, 37009 bp, synthetic construct
  misc_feature 1..37009: note = R126I mutated Beta vulgaris PPO2
  source 1..37009: mol_type = other DNA
tattccatcgaatgtagcaaattgactgtccgttgcaatttcggagtttccactcgtcgcatggtaaatggtaatgctatacgattctcacctctcaggagtctcaactcatcttcaactatcgcaggcatttcccaggaagaacccattaatggccaaagtgtctgagccgggtaaacccagtaagtcaaacattcgaatcacaactcaagcaaatttgtcttgtttgcgttatattttgctcatttcagccttttttgtttttccgacctttgcatactgaatattgtgtgtgtgtgtgtgtggggtttcagcttctgctaaaaggattgctgttgttggtgctggtgttaggtaaattttcgtctcttgcagagtttttgagtcatttgggaattctatgtgaaacttgtaactcccttcagtccaacgaacgcagtacaattttctatcaaatcatggtcctaatttccaattttccatatatattgttggaattatattgggattgtctatcactattaatagtattaggatcaattgtagagaagcacagaaatttttgggatcgaaagaatatctggattgccacattaacagcagatataattcttccaattggtttttggttcttcctaccttgacttgtctggtcaaacattataaactttaacctttaatatccattaaagtaaactataggatttttttgtctaaaacatgcttatataacatgaaatttgtgagaaaccaccttatatatatttttttgcgaaaacaaaccttaaacaaaattattatcgtgagaacaaaccttatgccaatttcgatcattgacccaaggttttggcattgaccgtgtcatgaattttgttgggtttaaaaagtcatgtgtcttgcatacgaaatggtaaatgcgggaaccttgggtcaatgtttggaatccgcataaggtttgttctcccaaaaaatgtttttgttcaaggtttgtttttgcaaaaaaacttatataaggtgctttctcagaaatttcatgttttataaagtagtatttgacaaaaaaccctaaaatatattatagaattattattgactaaattgtgtaaaaatgtactcttctaaaagtacattatagtattttagtggaacatttgcgagaaactactttataaatacgatttttgcgagaaatttcctaataaaaaaatgtgaagtgcaaaactatcttattgataattttctactccctcaaatccaaaatactatgaagtctttcctttctggtttgtcccagattagtttgtacgcttccatctttggtatgatcccacttttattatacttattagttttacgtgagttccttactctatctcttttaacaaaaatactcaactatctctatccaataaaaagttccttactagtcctatcacatctgctttttaataaaataacgtttgataaccacacaacttatatccttaaaatacacgttcaaccaagtgttgagattaatttggacggagggaataaatattttttgaggcatattggtagcagtattcggattccgataggttgactatgtttccaatgttgaccaacacttgccttgcatgtaattctaactttgctcttttttattcttcatttccctcgtattccatatacaatgtttagagacccattccttcctcttctcttctttcccttccttactatgctttgccataatcttcctcaaatgagtgcaaattaatttgtcgttgatgtaggccaactgattgtagcacatcttcatagttcatacctcaacacactcgtaattatattataccctacatgttaaatggctcatgaagctttattttatatcatacttcctccgtttcacaataagtgtaacacttttcttatttggaataatcacaataagtgaaaccaagctccaaatggtaagaaaagttcactcttattacaaatataccaccaaaaagtaagaggggatcacaacttcaatacttcttcactctactttattgtggtcccaactttctctctctaaattccttggtaactccccactttctctatgtttcacttatggtgaaatggaggaagtattttgtagtggtatttagctactaggccttggatgatatacaatcatacaatgtatttatattcacgataatttgctgcccaccttgattaccatgatttccaccaattttatcaatttcagtacttcaccaccccgaatttatattttttatttccaaccttggtatctccatttgtctgagtgcccgatccatttgtatcgcctccagaattgaagaagcttcctgcagctagacaattaggaaggttaaaaaagtttggagatggtggaggatagccataataatcattgttgggaggtggaacttggaaggttattgtagggttgaagtccttgatgaagaagaattgagttcaaatgagaggaaaaaggagcagggaagagggacaataagaaaaaaaagggtaaactaaaatcacgtgtaaggcatgtgcagatcaacatcagaaagcatagtcaacctactggtattagggcactgatacctttttgggtcaaaatttttttacaaggtatttcatgaggtagttttgtccatttttttttttacaaggtatcgtctcattttttttttatcatttagtttctcgcaataagtgtatttcatgaggtagttttttccaaaatttcctcatttattataaaatacctcatcttttccataaataatgcaatgtctagacttttacgctgtttacacatgctcctttgaccatctattgacacacaaggaaaaatagagtagagtcatgcaggatcttgttagatttttctcgatatatactttcaaaagatcaatttttttataattttttttttgaggggattttttttttataattatgtacttatcaaaggtcaaagttgtgcaccgggaagcataaaactctatgtgttgcaatttacatggaaggggaggagtataataagagaaaattatggtaaaaggttcattcctggagatcatgagaaaggaagtagaaagaacaaaaaagaacaatgggagtgcttttcaatgtttgttgtacgtagcatttattcatttgctataatgttttgtgacattgtagtggacttgctgccgcatataagctaaagtcccatggcttgagtgtgacattgtttgaagctgatactagagctggaggaaaactcaaaactgttgcaaaggatggtttgatttgggatgagggggcaaatactatggtaatgtttttgattattgcaggtcttgcactttagcgcacaattaatttctggatttttttttgtactgtggtggttatggtcatcaacatgtctcacccactgtgcttgcagatagagagtgaagcggaggtcacgagtttactcgatgatcttgggcttcgtgagaagcagcagtttgtaagtctttcattatctgaatggcacatactttatttcgaaagattgtaattgccttttctttctagatggcttcatcttcatgttgctttctgattcagtttcgtggctaactttccaagtttgtctgattgctaactctgtcatagccaattgcacaaaacaaaathtacattgcgagagacggtcgtcctgtgctggtaagtttgcttgttttacttttgacctcttttaagatctttcaactctggagcctggaaacatggtgatgcaggaggcaagttctctctattttacatcctttcttctctgtatcttatgacatttgcctcttattctgtgcagataccttcgagtcccattgcacttctcaagagcaatatcctttcagcgcaatctaaggtcgttttatgttaagacatacttgatgctgagagtttattgaattcttaaccttcttcttattttttttttatttttttagcaaaaggtaagtatattgcatttaccaaaaaacagtatgtacaccaccacagcagccatgtcagaatctagaaataccaccgaaaaaatcctacacccaaccagagacagttatattatatcctactcctaagtttctgtacccaatttacatcaatattggtccatttacaagatatttttataattcacagaagcacatcagttttaattagtttaataatgacctctggatgaataaccaactcagaccatatagccttattcctggctttccggaagttgtacgccagagcagcaagcacagcaatgcaaacctgtttcttatacctccttttatgtgtcttagcccatctcttatagctagtgaagatacagtcgtgtgcacaggattgaaccccaatccaactagcgaaagcctcacaacattatgactataaatacatctgaagtataaatgctgcacctttttctcctcttgcctgcacggtatcagaacaaatcccagctttagctaacaattccctggttttcagtttattcaatgccatcatgcaagcaatgaaagaatgttttggaacattcagtttgttccaaacacagtgagagcaagggacctttcctgcagttccacttagccacttatatccctgactaatagtatgactctttgcaccgtaaattgatttcaacttaactttttcataagcagtgaattgtgtgttgttagagtgtctagctgtctaggagattgggagaaaaggagggaccaaggagatagaaacacacctttgtgtttctttgtgtatttactttttagggtgggtcacgttttctgagaaatttgggaaaaggaagaaatagtaacacactttcccatttgtataacctgtatactggagctccaatataatttgcatttttttttgagctgcaagaatatgttgacaaacagttattgcttcttcctcagctacaacttatgttggagccattcctttggagaaaacgctatgcttctaagatttctgatgagcatgctcaggaaaggtaatgtcaagacatgtgttacctcgccttaattttcgttccaggaggtgagcatgcatttagaactaaaaggcacaaagactgttggtggtcttgcctgttcaaatataatggagaggagttttcgctacatttaccctctcttgaagtggggttgaaatatagcatcaagttgaatgcttgattaagtttaaaggacttgtgtaactctttttctgtttactgtgattacatgacctggttgattaacataatggtctgtttatctgtagtgtgggtgagttttttgagcgacattttgggaaagaggtaatggtttaccatagtatttctgctttagtggtaaattgtaatgttgctgataattatacttcgctgcagtttgttgattatctaattgatccttttgtcgcgggtacaagtggaggagatcctcagtctctttctgtaagtgaacattttgtgcttcactcccaattttttggaggctggaaatagattcttttccagttgttctgtcaaaaatagatgtagctttattttgaatttgaagttcccaattgttcattttgactattactgattattgctaagagtggcattatgctattatgctcctaaaagaaaggtgaattttgacctacatatagtataatgtatcaatattggtttaattgtttgttcttttgttccttttggtgctcatcttgcgccttgttctcatcgctcgttttttcatgttgcacttgatttaaatttgctcagcttaacttgtctttttgaatttatattacttattgctatattttactaatttcgttgaaactaattttttgctgaacttttcgttttgttgaaatcatttttctgaattaacttgattttcctgaatagaattgaattttggtgatcttaccttttctgcagccttttatttctttcttgtcctttttccaatctcatttttttatatttccattgtgttgacatcttatcattaactgtgcagatgcgtcatgcatttccagaagtatggaatattgagaacaagtatggaccataagacgtttattttaatcgacatgtatgtttcttagtttatacatatattaattctgtggtaaaaaaaccgaacaagaatatctttttttttttctatcatcaaaaagggtgaatatatgtagaggaaaaagatttgaatcaagatattagcctaaagcaataataatgttagtaatagctttaataacaaattcaaaacgtacattaatgaaccgagaggccggaaaatagttaaagtgaccactaagagaagcgaaggattcatgatgggttttcaacccagtagggcaaatttgttcaatgttctttacaaatcaagcttattaccttgtgggtgtttttgctagagatgaatgatagaattttccctagttggaagtcttttttggttactttatgggagctagtgatgtaatttgtttcgccttatggcatttcctaacatgtgcttttgtgatgtattgaagctttttttttgccttaatttatgctggattttaattttgttctttgtttcatttttcttgcttttgaaaaaaatatatagatatgtatatattaggattggtcgaggattttgagggaagggaaagacctaagaaaacttggatgagggtgattgatagtgatatgagtctatttgggatcgaagaaaatattcctttggataaggtgtagtggagggttgagggagcaaatttatgcagattagcttgacttaaagtttttctttttgattatttttcatttacttgtgttttgcaaacatttactcatgaatgatgtaaacttcttcaaccaaatctctggaaaaaaataatctacatggaaaaaacattattaatgttaacttgacagagatcccatccttgtgaagcagctagcaattaggcatctaacaattgacattttaatggacaggatagaatgtctcttgatagtcaataccctctgtttcattgtatcccatagctactaatctagtttgtatctttccaaagaaccattattttgaagtttcaccttgaacacccattttgaaccaatatgtttcttgcccttggggagaggggctaattgccatgttttgatgcggatgcaaagacacttgttctacctgagcctattgacttgatcatggatactctagggtttgaactcaagggaaagaatcaagtcttggcatgtgtggtgacatggcgtggggatggagtaaagaagagtcatagttctgttaggatatgttcttgcttgctacatagaatcgtagttctgttaggattgctatgatattatatctagtagatagattttatagttaattaggataaacatgtgatgatcatgttataataggcatgtgattagaggataggattagcttaattcttatcttgttgttagtttaattcttatcctagttttatgtttatcttagtcgaagttgtagccatataaagggcgttccattcattaataatacttagttttgctttgtgttttaaacatacttcttgattattgtttgcttgtgagctaactaatcaaaccattaaagacttttcaggagttttagtgctaaacatcttaatttcaggagtgattttaagagcgtttagtgatcttgaatcaagaaatatccttgttcttgttcgactaatatcagtggttttgttcgagttcttggagttaatctcttcaagattcttattcaacttgattgttgagcttattggtttagtaatcatatcaagtggtatcagttttccagggaggagaggatagataggattctctttgatcaacaaagatccaagggctatcaacaaggttcaaacattgctgcttgttcaagacttgatctttttctaccaagatgcattctttacgtcacaaggtagtaataacaagattaagagtggtttttacatccaagaatcaatctttcacgtccaagatttcatctttcacgtctaagattcattctttaagatcaagaaagttataacaagcatagaagaacacataaccatggagtccgagatggacaagcttgccaaagctatgcaagcacttgcaaagtcgcaaactgaatcacagagtcgactcaatgagaatactaccacaatcaatgggattggtagtaacatgaataggttggaggcacgcatggatgccattgcaaccatcatacaaaagaagcttgatcggaatagtgccaacttcataggtgccaattcagaggaagagttggcagaacgtgaagaaagatcatccaagactacatacaatgatgatcgtggcttaaagttggatgactataatggagatagcaatcgagaagacttgttacagtggattcgacaacttgagaaggtatgtgattatagaggctttgatgacaagaaaagattcaggattgcctccataagactcacgaaatatgctggaatttggcttgaaagcttcaaggcacaacgagccaagaaaggtaaagaaaagttgtgtagttggacaaagttgaaagttcaagcttaaagagaagttcttgcctagtgactatgaacaaaaatagttcataagactctctactataagccaagacacgcttagtgtacatgagtacaccatggaatttgacaagctagggcttatatttgacatagaggagaaagaacaatggaagattgcaagatacatcaaaggcttgaaccgccacattgccaagaaggtggaagtatccacttatcacacctttgaggatgtgacaaagttggctaagaagtttgaagaacatgagaaggaagagaagcctaagagttcttacacgcctaagtatgatactaatgctaaggccaaggctagcttcctactcaaagtggtatgaaggacctaagaggctaagaacctcaccccacctaaagaagacacaagagttgagaagcctaaagtcgtcgttccaaaggagaaatttgaagagatgagaaagtgcttcaagtgtcaaggaaggagacacatagcaagcaattgtcctaacaaaagagtcctcaccatgagacaatacctagctttgcaagaagaggaggatgtctattagttcgtccctgatgaagagcaaacttaggggaagaagaggaggaggatgcttttgctgaggatgatgcaaggctagtaggggtcaagaggcgcaccttacatgtcgaccatacacctagcatggagcaaatggaaaaatcttttccacactagatgcaaggtaggtgactatatatgtaatggtataatagatagtggttcttgcactaatgttattgtatctgaggtagtgtcaaagctaaacttagctacaagggcacaccctaagccatacaagttgagtttgctagatgatagcactggcatgagagtaaagaaacaagctttgatttcattctctataggggttataaggatgagttatggggtgatgtattgcctatgagtgcatgtcatctcttgcttggaagaccattgcagtttgataaaaaggtcatccatgagggggactctaatgtgtactctgtgttggttggttctaagagggtatgtttgcatcccttagctcctcattcagtggcgccaaagcaaccacctaagacaccaagttactttctatcttcaagggagttcgaacaagaggtggaggaagaaggttgtgcttatgccttgattgtaagacatgctgccacaagtgtcaagactactagcaatgagaagctcgaagccttgatgaaagagtttgaggatgtctttctagaggaactacgacccttgagaggcatagaacatgctgtagaccttgtacctggcgcccctttgcctaacaagcctgcttataagtgtgatccagtggcatctagggaattgcaacgccaaattgaggacctaattgaaaagggctatttaagggagatcatgagtccatgtgttgtgccagctttactagttcctaagaaagatgacacatggaggatgtgcatagatagtagagcagtgaacaacattacagtcaagtaaaggtttcctatgcctagattggaagatatgttggataagttacatggggcatcaatcttttctaagattgatcttcgaagtggctaccaccaaatgaggatcagagaaggtgatgagtggaaaacaacattcaagaccaagcagggattgtatgagtggatggtgatgccatttgccttatgcaatgcgccaagctctttcatgagcttgatgaatgaggtacttcgtccgttccttaacaagtttgtggttgtttacatagatgatatacatatctatagccaaaatgtggaggaacacttgttgaacttgcgtagcttattcatgaagcttagagagcaccaactctatggtaagattgatggcgacgaggttgacgggggattatggcggcagtgaatcaccctctttgccggtcactgaaatacaacctgaggtatctttaaattctgtaattggattgactaacccaaaaactatgaaattgctgggaaaaattgctggatgtgaagttgtggtgatgattgaccctggggcaacccataattttttatcactagctactgttgagaaattagctattcctgtgtcggaatcggaaggatttggggtttctctaggggatggacaggcggtgaggggtagtggaatttgtagaggggtgttattgagtttaaatggtggagttgaagtggaaacagattttcagcctctgggtcttggtaattcggacgtgattttgggtgtacagtggctggagacgttggggacagtggagagcaattggaaaacacaaacaatggggtttgaaatcgagggtgtcaagttcactttgaaggtgacccatcactggcgaggtctcgaatctcactcaaagccatgatacgtaccttatgtaaagagggtggaggtttgtggcttgagttgaaccagattgagcattatcaggagaaaacaccgcattcatcagccttacctgaaattccagttttcttacagagagtccttacccaatttcagtctgtgtttgctacaccagaaggcttaccaccgataagagaacatgaacatgcaatagttcttagagaagggtgtaatccggtaggggtaataccgtaccgttatccacagttccaaaaagatgagatagagcgcctcatcaaagaaatgttggcttccggaatcatcaatccttccacgagccctttctcgagcccggtgatattagtgaagaagaaagatgggtcgtggcggttttgtgtagactatcgggccctcaataaagaaacggtccccgataagtatcccattcccgtgattgatgaattgttggatgagcttcatggggcaacacttttttcaaaactcgacttaagggccgggtatcaccagatccgggttaaggccgaagacactctcaaaacagcttttcgcactcatgaggggcattacgagtttttagtaatgccatttgggttgacaaacgcgccggcaacgtttcaatcccttatgaacgaggtcttcaaaccattcttgcgcaagtttgtcttggtatttttcgacgatatattggtctacagtagttctgccaggaacatgaggagcatttgaccttggtgttgcacaccctagcagctcataaattgtttgtgaatcagaagaaatgtgattttggcaggtcggaagtagcatatatggggcatatcatctctggtcaaggggtggctgtggatatggagaaggttcaagcgatggtggaatggccccttcctaaaaacctccgggaattacggggatttttgggccttacagggtactaccgcaaattcgtacttcactatgctcatatagccaagcctttaactgatcaactcaagagagatgcgtttgggtggtctgaggcagcaactcaagcctttgaaaagctcaagaaggcgatgatcacatcccctgttttggcaatgccggacttccaagagttgtttgtggttgagaccgacgcatccgggtatggtctgggggcagtgttaatgcaaaacaaccgacccattgccttttacagtaagttgttaggtgcccgggctcaattaaagtcgatctacgaaatggagttgatggccatctgcatggcagttcagaattggagatattatctgctgggtcgacatttcctcattcgtacagaccaacagagtttacgtcatctcactcagcagcgagaagtaagtactgccttccaacgttggatgagtaaacttatggggttcgattttgaaatacagtttaagccggggtgtgccaaccgggtagctgatgcattatcccgcaagacagtgggagaggttgaattgggtgcgctgatattaactcatggggtggactggaccgacttggagcgtgaaattgaaggcgatcctctgttgtgcaaaattaaacaagacttccacgggggtgctattactcctgtgcacttttctttggtggacaacaagctgttgttcaagggtcgatacgtgattcccagctcttcggtttttattcctaccttgctgcgagaatatcacgattctcccattggagggcattcgggggacctcaaaacatatctcaggatggctgccgactggtattggaggggcatgcgcaaggatgtggcgcggtatgtgcaacattgtagcgtgtgtcaacaacaaaaaatgtctcaacagatgccagggggggtactacaaccactccccataccttcctcggtttgggatgacttgtcaatggacttcgtggaaggcttgccatcttccaagggggtaaacaccatcctcgtggtggtcgatcgtttgtctaagtacgcccacttcctcccactacgtcatccatttactgctgtgtcggtggcaaatgtgtttgtcaaagaggtggttcgtttgcatgggtttccttcctccattgtttcagatcgggatcgaatttttatgagtgtgttttggcgggaattatttcgtttacatgacaccacactcaaacgaagtaccgcgtatcatcctcaaacggatggtcagtccgaaatcgtcaatcgagctctggagacttatttgcgttgctttgtgggggaatacccgcgctcttgggctcagtggcttgggccgaattttcatataatacttctcctcatctctctaccaaaatgaccccgtcaaggtcctttatggtagagaccctcctactgtgatacgggttaatcggggagcctcacctgttgaaagcttggaaaacatgctccaagagcgagacgcagtattagatgccttgcagattaatctgattaaagctcaacagaaaatgaagagtagtgctgatgctacaagaagagaggtgcattttaaggtgggagatcgagtgtacttaaaattacagccttaccgtcagaaatctttggcttaacgcccttatgagaagttagccgcccgtttctacggaccatttactattttacagaagattgggcaagctgcatacaagttacaacttcctgtttctagcaaggtgcatccggtgtttcatgtctcccaactgaaacaggccgttggttccattcccgtttcagccactattccagagcaattgtcttctgacttggagttagaggtggaacctgatgaactcctcgatgttcgtagtgtttctagaggccagcacacttacttggaagctctcattcagtggcagggattaccatcattcgaagctacctgggaagatgtggctgctttccatcaccattttccatccttccaccttgaggacaaggtgaaactttgggggggtggtaatgtgatgcaccaaactaccactccactactcacctattagaggcgtaagaaaaagggggtaaatcaggaatagtttacaaattctgttgaaaggaatattttgtaattatgatgtcagaggttgttagcaaaaaggcagtagagtaacaataaaaaggggaagggaggagagaagaaggtattgagatttttgtaaggaacttggcccttgggagagttgggagcctctcgaaagctcaccattatcttgtgaatattttccttcctggttatatacaagaaccttcctctgtcaatttcttttctctctaatcttatttcttattctgttttctggttgccattgtttgaagttgcttgttgtgcttgagtaaatacgtgaagtggtgaaacccatctgaattcatcacatctattccaagtggtataatacaagcttgtaatccaaatctaatgagaaatctaagttatgaagaatttcaaaagaactaagtacccttgttttggatgcccaaggatttacttgccgctcaagttaatgctcaacgtgcaagatacaacctctttagtatcccaaggtagtttccataagaattaattgagctcaaatcaagaacaatatttttatgtattaatgtgaacacttcctgaattatattagatatatggtctgaaggttggaagaaagattagcttttaattttaagtttgagatagtttttagaatcgaggaaagattagctcttaacttgtaaactaaggattgctttataagtaaaacattagttatggaactcttaaaattggttttgaacatttctagttaaaaatcccatgtaattctcccaaactagcttaaaatctcacatttcacaagctaaggagagacaaatggcgttctcttgtgaaacaatctaaaattttcattaggctactgttttcaagtatttatatgttagaagtgccgcatataggtacataaaataagtttacaaacacaagtaggaataaggaaaactaaaagagaaacttcagccatacaaaaccggctgaaatcagctactactttctactttctagcttcaaaatctgattgcaagtctcctttaagccaatcaccaatgaaaacctttcctccacatgaagtgtgctcaaatcaagagaagaaacccatcattcgcctatagctacctgggtcagatgaagatacggcaaaaaaaacgctggaaatcagtgaaccaaaataagcaccaattggatgctttctgtccttgctacattttcttctcataggactacttcaagccatacatgaataagcagttagatccagctcctagcatccatttgatcgtacaaatgagctccaaaaagataagtaaaaccaagcagccaaaacctaattaatactaatgatgaattagttgaatagctaatgacgatgaagcaacactttagtaggaatagtgttaattatgatcaatgctacttaatcttctgattaatttttggaaaaatgtcatatctaccttctgtatacacttattcataactatatcgtattattattatttttaaataactaccttttaagtaccaaaacctaagaaatcaggcacttgatggattccatccaaagatccatttggcggggcccactaactgacttttgattttttgcctttcctcttttggttaatctcaatggttcatcaataacaactcaatcttctccccatttcatcaaatcatccctaaatcagaactttttcaaattcacccaaatgaggttatggaaacctctaccaagtttattcgaccacttttagtctagctcaaagttttacacttgcttcaaaaactaagatttattaactttagaaattaggtttttatttttattttttatttaactttgtaacaatcttaaataactcaggtgctttctagagtttggctttaattgtttttcccttggttatgtgaaagaagtatgactactttctccaagactaaagtagagagcaaaaaatgcaattctggaatttcttgcaaaagaaaaggaacgagttaatgataatgaaaaacaaagaaaatgatgagaagagaggagctgaatcaatcatgatcatgtattttaaagttttttttgctattgaagtgacttaagaagaggaaagaggatgagtgaagacaaacaaaagaaaggataaatagagggaaatcttgggcttagaaaggtgaaaaggtaagaagatgagttagtgggccccaacaaatgtatctttggatataatccgtcatgccactgtttggggcttgcttaagtccatacattacttcactaattttacaaaatttattttcttgaccaagaactgaaaaaaccttcagtggtgatctattaggttttggaagttaaaaggtagttatttaaatgtttttaatataaaaggtagttatttagatatttttaatataaaaggtagttatgtgaataaaagtgtatataaaatgtaattttttgacatttttgccttagtttttcttgctaattcaccttttcaacttgaccaagttgctatgaggagaaaacgagcaattattaagcaaatcgcaacactagcattaatccatggcccatgaaactctccataattagagattggattagcacttagtagaacttcttgctcctgctccaggtttccattacttctttatctaagtgcatcaaaaggttgttgggttatgaaaggtggtggttgtgtatagtcattgtcaaaatgttgttaatgcactctatttagaggatgagggattgaatagttttcacctcgtgacctttcattcctttttaaaaaaattgataatgtgtattggtcctatgactgtatgaatggtaataagctatctcatgagctgttactatcttcctcagagtctaggtagaagggtttgggctgataattttctactatgtgcaattagtttgttggatttggatatgctagttgatataggtcctttcccttgggccttctcttaatataggcctacagtgtgattgaagataaatcttctggagaatataagaacaatgagatggattggttagaggttgatttgttcttttggtgtaagactatttcgggttctctattggttatgttcagacgccagaatatgtgttggtgattgttttccatgaacatactttatccgcagagacatttttcttttttcttcctataagattatatttgtttcctctcttggtgctcatctcagtgtctctactttacgttaaactgttgacattacttgacaatgcgtatatttgtcgcatggtgctcttccctcactccacgtcgaccccatacatcaaaaaatgccattaaagaatattcgaactcacaaccttgtgttgaaagaatggaatccctaccaatgactcattaattcattttctctttaagaaataaatgatttcctcacaaacttttaggctttaagagcccaaaagataaaaacataaaataagatagacatcaacgtcaagattagccttaaatgcacaaagcacatgtcaaatgattgataactactcacgagttgcaactctttgggcgttgcctaatattaattggatctcttttaaaaattgttggtggttatggttggtggagaggaccatgtaacttttagctggtcacaactggtaatgattgtcacttttactgcccataaaaaaatttaaactgttgaatatgtttctggcagtggatctgacaaatcctttacaagttggcgtccattttgttttgccatgtgactcaattataatacgtgagttttattatccaccaggtttggctcactaatttccggattaattcaatctaaactgtctccaaagaaggaaaagggtggaggaggaaagccttcttctaatgaaaagacacgcatacgtggttcgttttctttccagggtggaatgcaggtattagcatgtagctttcattctgttaacatttgtggttcttccagacatacatccaatgctttttttttttcttgctataaccataaacattcttgtcatgaacattctttaatactgttgctgagcttagtgtattcgttcattcatgtaatttcctctcttgaggttaaaatggcatacagccttacaacctatatccataatgctccttagagtagaatccctaggttataacatagtaccacttatcaaaataaacatggcacacactgcaggacaagaagtaaatccacctagagaactgagcacctagtagtaaaagcagcgatacattactaataacagtagcagggccataagagtagtaaatgggcctcatttcaacactccccccgtaatggtgagagagaagaagcagtctgaactcccagcttggagagcaaaatagagtgttgctgaacagggagaaccttagtgaaaacatctggcacttgatcttgagatggaacataggtaggctgaataaccccttcttcatttgtattgtccctcaggaaatgacaatctatgtctacatgcttggttttctcatgatgaactagatatgctgctatggcaagagcagcttggttatcacagtagataggagtagcactggactttttaatgcgaagatctttgaggagttgtttgatccacatcacctcacacacagcaagagccatggatctgtactctgcactgaccacaagaaattgcctctttgactttcaagatacggggggagtcaccaaggagcacacaaaaccagatgtagaatttacaacacccatcccattcactatcacaaaatgctgttagttgagcactagacttgttcgccatgagaattcaccctgttggcagcttgaagatgcacattagtggggcagtgcataaatttgcttaaatcatgtatagtgaaggcaatatcaggcattgccttgtaatagtgagataaatgagcttccccatcaatttttgatacacatcaggttgttgaagaggatcaccattgtcagcatagagcttgacatgtgagtccatacgaagcctcaatcgtctgcaatttataaaaccatattcatcaacaagacccatcacatacttctttagagataaaaacgatacttcactacactgatccacttcaatcctcaaaaaatatcttaggccacccatatctttcatgtgaaattggccagcgaagaaactctttgcttcctcaatagttgctaaactattgccagcaagaatgaggtcgtccacatacaccaatatagcactgaaacagtgagagttttgcttgaagaatagagagtagtcacacttggattaagtgaatacattttgctttaaagcagtgttagcttggcaaaccattgcctcaaagcctacttcaagccataaagtgacttaagcagcttgcacaccttagttcatttggtgtcacttctgccatcagtacttagctccccctctccttgaactttgatcctgttacatgtttcactatatcctggtgatagcttcatgtatacactatcctacaattcaccatgcaaaaaagcatttttaacatccatttgtttgcaagaaccaaccctctaaggatgcaacaacaagcatgtggtcatctttgctacaggggtaaaagtctgctcataatctattccatatctctgtctgtcacccatgattacaagccttggcttatgcctattatttgtgccatcagtgctgtattttgttctgatccatccatgtgagggatggctcatttctacaaaatcctagttccgttaggatttgtgttgttttcctaattctagtaggaataggactcctaaaatcctaatcctcctagttctgttaggagtttaaaagttttagtttgattgtaattctagttgtgttagaaatccaaatcctagattcatgtcacgtatggttagaacatggctagtaggataatttgtcttgtgatgtccatagccttggcatttgtggcacctaactttcaatagcttgtcttctgtctccttttctttctccttctttgaggaatcaacgtttttagagctatctaaaccactagcatcaatattaggtttaaaagtgctaaaagatttcgaatagttcttacttgcatacaatttctttttctagtttatgtagcgtcaccagggaacaaaaactcggccgttccgttctggaacggccgctttgtaacggatttcagagaggccgttccgttaaataccgttctagaacggtgatttggaattcacaccaaactcggcgcgatagcgttacgtaacggtgtaacggcgttccagaaccgttacaatcacataacgtccgttatttgaagaagaccagttcttttggtggaggaagaagaagagccaacgcaagatctatagatctgagttaaaatttgaaaataaaacatgtttttttatttaaattaaagcttacagaggatgtagaactcaaattcgagtaaacccctcctttaatttcattaggttactgcaaatcgaaccctaaattgcaaaccctaatttcgaaaaaaccctaatatgcattgggatgcaacgctgcttctccggtcatggcagagaaggtcgacgagtcatcttcggctgcttttagcactgtagctgccggtggttggcttgtttgcaggttagtgcttgctggttttctttctctcataccgatcatcttcttcttttctctcttctctttttcttttttattgtgtgactgccagtcacgtgataattgcaactcataaagtatctctttctctctcttcttttcatccctttttatttttctttcccttttagtttttattccctcacgtggaatcacctaattttcatccttttttatttttttagttacactcttacacagaagtatgttcaaatatcattatagtacctcaaatattgtatttataagagttttggacataatatgatatagaaagtaaaatagaagaaaaataaagtttaaatgtcacttgtgtgatttttttaaaaaaattcacgccgcgacggccgcgaaacgttctatttcccgttacaagccgttcccgcgataacgcgaccgttcccgcgaacgcgaccgcgaccgcgttttttttccttgagcgtcacatcttgcaagcttcttcaaaggtgagttatgtgtacaactccaatttctctccaatcccctccgtcctcatttaggcctccaaggaagctacttaaacattgatcttcaagttcatcaattttccaaagaatggataacttctcgaactcctttatgtaatcttcaacggacatattcccttgtttaagagtagaccattccatgtacaagctttgtttgtagttagaaggaacaaaacgtcctcttaacaactttttaagcttatcccaagtagagattttgggtttattagctttcacacgctgcctctttactccatccaaccaaatagatgcatatttggttaccttaagcacggccaccttgtatttcttttcttttggtgtctcttaatcccaagtagagcttttgcgtgtgaaagctaataaacacaaaatctctacttgggataatcttcttcttgtttccgaaacaactaattcttatggtagttaggaaagcaagaatggtttctaattcaatagggaatatattaattattattagtttaagttaaatagtgcacgaatctaaatagattattcgtctcaaaatctcacttaagtatagatttgtttggacatctgagggaagaagaagagagcgagataaaggagaattatcactcaatgaatccatatcccgagttttcccatttacttctttgaaagcaatatagttcacgaggtcttattatcagtctatggacataagagtaataatttaagggcaaaaactatgactttatgggtttaaactgatacatgttctgttaaactgatagatgttctgtgttaaaccgatactcatatattcctggttaaactgatagatatatgatttaaattgatacccgtctcagtcatgtcttggattgagacggtctgacacaagactttttgtgtattatatatctgattagaataaatttatcctgtttactaattattttatcttctccagacacttgttgacacaatatgcaatcagtttggtaaagatgaactcaaactacagtgcaaggtcctttcattgtcctacagtcataaggggatcccttcttcagaaaattgggtcgtgtcttctgtgtcaaaaaattccattgaagatcaacaatatgatgctgtcatcgttaccgtgagttttactttgcttactgctattgcaccaatctttcttcttttgacacactgataatggcaatgctgttgtggtttgaagccatgttatggggttttagggatatttatggagtctgatctaatatgttattggataaaattcagatctgtaacgtgactcaatgagattgaaaaaaattgaatcaagataatggattggaaaattaggagctaacctagggtctataagcgatccacttggagtctcataccaagcaggtattcgacattttaggtttatattgctgctatggctcatatgggagcctacatagggtctggtgcttattcctttttcttttgtctagttttggggctgcacatttctgttgtgttttgatatggatagccatcacctgcaattgcatggaggctgaactaagttctataggggagcaaacagtatctgttggaaatttattttcatattgtgtttttaaatgctataatccaaaatttgttgttcccctaaaatgcctaaaatacccttatgtaactgctccatctgtcccttaatagacttcccatttctccaatgcatgtttgccaatacacattttgtattgttaatatcaaaaattacatattagtaaaaattataaaagtttgattttcctaatgtacgcaatgagacgaatcaaacaagacgccatatgactatgttttttcttatacttcctatgttttttaataagtgacatgttttccttttagggaaatgtcacaataagtgacacatagctcaaagtagtaaaaatacttctcatttattacatctttgccattatttaattgtttcacctacctactttatccaatactcaaatttgattggttgaacaattggtcccaactttctctagactccttggtattccctttcccccactttctctctgtgtcacttattaaaaaatggaggacgtatattggaaaaaaattggaaggttttcttcacttatgaatagtggtaaaattagagatgggaaggctattttgggatggatggagtaatatttaaatttttaaaataatgtcattgttttagtgatgaaataaaattcaaggctattttttctagtaattatgttatctgtacatcaccacacgtatcgcgtgcatataagactagtttgatgatattccaacactgttcgaaggaagtcaggcatggaaccatgtttgcttccatatgggaaatattttgcttactctccttcaaacatctacctcattatcccagaatgattgatcgaatctaatacaaatatacaattgatcatatgccaccagggaattacatcaaattaaatttttatagaaggggaatcagtcatagcctcatagggaacgaataagtgatactcgccagtttctttcctggttacttttcctcttctcactagccatcctttatgtatgggtatgctgcatcattcctgccactggttgggactcccgtttgaactatggggggatgggaaagctaagccatcatcttcaaattgagtttcttgagaatgtaagacaccatctgtaagatgaatatagtgcactctatagtcaatgtcatgatctttatgggtttatctgctgaaataactgtgatatacccagctctccatttacaaagttttcctacatattaaactcttgcccgcaattctagaacttcattgtagaacttttcctacataagcatcatttgtcttttctgtagtaaaagttagaaagagctttattttagaacattcgtttttagttttctttgttgttgattactccgccacttttaatacttttatgattcaagtatttgacaaaatcatgtaatttaggtcctctgctgcatgcagtctataccctctctctctctctctctctctctctctctgtggttgtgtcttacttgttgagttactaactccagccattacataaagtaggctggcattatgatgagcaaattactcaagaccacatgttagctcctttttcttttctccttattctgaaaggcaaatataggtccatcttggtgcttctcatgtcataagtaagctgaccccctccttttccagggaataggacaataatccaaaagtgagggttttacatgttgggatttgtgaagtttcttattttacttaatagccgagtcagtgttacaatacatagtaccgtgttacaaaatagtatgtaacaccaagcatgtttatgtgcaaaattgtgcaagactttgttgctggcacgccaagggctgttttaatgtagtttacttattcttttaggtttttcagatgacaatcataaagggaattaggagtgtttttattgtagtcaatccctattgtgctacaacgataaaagaaaaaagcacaagactagaaggagaagtaatgtctaggaaagactcctcacctggggttgctagtcacctacacatcttagaaggcatcaaaccaaagcttattcccctcgactgttttcgggagaaaagaagacaaaattgtttctaacttatactttaccagtttcactacagcatcagaaagaagcaaaatatgctcccacaacacggcgaacctagctttccagatgtgataaaccagaccagcaaaatgattattttcactagagctttgagtctattttttcggtttttccccttcttcctggtaatgtcacgccaccaagccatcatctcaattttttgagatttgacgtaatcgctcaaatagctgagtaagacacttcttgctctaaatactaataaaaaagaggtgaatgtgggtctcagccatgttactcaaatcggataaagtgtctactcttattagggtttttgggtgttggactcatccatttttttttgtaaaatgtcaagattttggtttgaaatgagagattcaagtgtcgtgacatgagtcggcacgcaacacttaaacgtgtcgaagtaacagagggtctcagacaatcaactttaatcaatcacgaaccccaaaatttatgcaacctttgctcatattcagtctctgtaaagcactcaactgcagcacacccacccattcgcttcacctacagcaggagggcacccaagtaattgctatgatgagcgaattattctgttttgccttgctggaatattgctgttagatttgctgactcactggcagttaattatagtcagagaatgagaaatatcctgtagagagagaaagggtatcttttgtatttagctctataaatagctaaggaagggaagggcattgagagtttatgatattataataggagagatttagcctctcgaatgctgataggagcgtagctcttgttggattatcaatactactctgtttgctctatctatttctactcaggttccttcttgtacagtggatccctgattggatttacttcatcaaccagcagataaaattatttgtaggcacattgaaaccattccaaacctaatgaggccaaagtttatcacaaagaatataggagccaaatgtaggcaacagataagagtataattgccagaagttgaagactccaggtattgttcagaaaccttaatgcatatcatcattctgacactagattttccccggagccaactaacaaaaatgaattaaagagattaaggctatgtttagttcacctgaaattttctgatctgaacttatctgatctgatctgaacttattttttctgatctgatctgatctgatctgaaccaatctgattacaagatcttatcttttagatttttctcaatatataagaaaaaatatagtcatgtggggtcttgtttgattcgtctcaatgagtactttattaatattcaattattataatttttactaatatgtaatgaaagatataatgatttttaaatataagcatgatctgaactgatctgatgtgaacttattttttctgatctgatctgatctgattagatctgaaataagcaaaaataaggtgaactgaacatagcctaagcaacaattgagggaaaataagatcattatggctaagataagataaatatgtaatgataaaatcagagtaattatatcagttacactctcaacattcgtcagattgaggtttcctcccaaaatgccaacccacttttctgtattttcacgtccttctctctacccttctaggtatatattacatcagctgtaaaatttttgaaccaactagtagaatactgatctaccctcaactgcctcactttctcattttttctgggcctttttctctctagcacaagtccacataagtgatgcatagcagaaatataattccactagtcatcctcaatattgatataacaaacacatcacccacatattatcatttttaatcgctgcatgcgaggcatacttacccaccaatcaggatatgcataacagcgttcctaattccaaaaccaccatatatcttgggtttgcaactctcatccctagcaacaaggggactttctgaaaaagtggcagattccgcccacaagtagtttgtacggacacctttattatattattaatatcatatttcggcaacacaaattaccagcccagtaaaacatgaattgacatgagactaacaaggggcccaatctaatatcgtacgtctgtactaagcaatgtataaaaaaaagctcaaggtgcattgatgcaatagggatcctaatgtgcataggtgcgcctcattgaagtgaggcaccactaaggataaataaaaaagattgatgtaaaattaaattgtgcaccttgggtgcgcctcgatgaactttttttgtgtgcctaagtgtacctcaagtacgcctcattgatatcgcctcgcctggcagaaaacgagcttgaccccaatcgccttgctccccaccgcctaggcgtgcctcagtcacactttttaaatacattggtattaagtactcagaatggcaaaaagaaactttgggcattaattagacatttcactttttgtgcaactatttgtgacttcagagattgatatgttttctacattacagacttttgtgatggctgcatggtctccactgtcaaagaacattagtttaagtagaagaaatattgctctattaccttcctccctctacaaacaaaatcctaaaatgtggttatgtagtgccaattcaaacttgtagatgcatgactaatgctttcattatgctgtgggtttttatactatgattcatgtccaattacataacaattagctggagtcaggatatgtcacggaaattttaagcctggcaggatgattgtttatattttctctttttcggtgtttaagtcaaagtaaacttctaggctgctcttttataggctagttgggctgttggggagatctacacattaagtgtgaagaaatcttgtctaactccagtttggttgagaactgtaagctgtcataacatttgttgcatgatgaggccttgtgggattatcatgttagctgtaaactctaaacttacttgaaatctagtgttgtgtctccttatttctgtagtcaaaattgaaccttctgtacgtttttgatacctgcgactagaatgatggaattctgaattactgatactattacaaccatctgctaagaacgaagatgactcttagctaatttctcagcagatttagagaaattaagaagaattactaatgaatatttaaagagaaaactaccaagatatgattgtattgatgaaaaacaccaattacaacctaaccaacattcgagaggttggagctctcccaagtaaccatttctctcactaaacttatcaattttcaagatgccttttccattctcagttcctctatatttatactactccccttagcaaactacccaacttattccccaagtaaactaaagagataatatctaaaatacccttccccctacaataatattagttcttagcattaccggccccctaaacttccaccttgtcctcaaggtgggtcgtaatcatcactaaattctgggcctctactcgtatattcagtgtcttgcagcccttcaggccccaagcctaggttatgcagctcgtgttgcggctcctcctcatatagttctctggctggagtgagtgcctcaactataatgaaaaagtcctggaggtggggaaggaaggagtgtctgaaatggtgtggtgtgctgctggtgttatgggcttgtgcctgaaagttttgggtttaaagagatggagtggagaagagtggagaagtgactggagacgtaaaagaaggaatcataatttttgtaagtggtgggttgaaaaagttggtgggaagaattgtttttataaaatgtagtgtaatggtcgaaaaatgggtggagtaagtatggtttttggctggggatgtggtactgggttgaaaataaataggtctgagcttacttgtaaaattggcctcaacatgagcaggcccaatatcttgagccaattccccaaaagctggcaatagagcactcttaattgcattgttgtgggccatcgggctccaaacatatattcggaggagccggacttctttggtgatgtcattagcttggcccattgcacactttcccttaacagcctcaagatcttttcccacttttgtaccccaaccacgtggcttcaccatcctttctttcttgcttttgtcacttttttggcaatatacgagtttgtccttactaccctcatcttctaatgttggcttcctcaccaagcttaatttctggaattttgtccaccaaatcccaccacccatcgtcaacaccatacctatctacaccggccaagaagcctggtcctccacccgaattttcgccacagacaaagcctgaacaaccgtcagttctctcaccggagaagttcacaggtccaccacctgacccactagttgctgatccacccttcacaaatctccctcctctggctgccacaagtagtggttcctccgtaatactcatatttctcgtccaagagccctggaccaccaccggacccacttccaccggcaccaacttgttcaaatgatacttctctttcttttccaaacagcctacttggactggaaaaaccactgcgattgtagcctccgccagatctgtagcctagtgcacctaacgtgcttccaactgcaacccaatagggatggaaatggatgggattcggggagggtggagcatcacccgcatccgtcacccgcatccattcgctccacccgctccacccgcatccatccatccgtcacccacgggtgaaacgggtgggtcggtgataaacgggtggaaccatttagggggtgtttggtatcatgtttttttacaaaagaaacagaatcaagtaacaaaatccgtttctacttgtttggttctatgttgctcagactcgagtacccatgtccgacacgggtacgtgtccaagtgtccaactcagctattttctagaattttttatattttttaacccaaaacaaagtgtccaagtgtcccacccatgtccgactcccgaggatccgacacgggtacttgaggtgaaatgaagagtccgagcaacggaggtttggttagtgtgtaaagtaacaattaccgttacttgaggaaaacacatccccccaagttgtttccattcaaaaacctaaggaaacaaataacgtttcactcctcaaacaagaggaaagggaatgggttatatttatttccattccattaggataccaaacaactaataagggtaacacttattattatcctttcccctccttatcaaaatcctttccattccgtttacggtattcataccaaacacccccttagtatattttctaatgaaatttgtgatatgatatgcatgatataaaataattctatcaaaaatataaaaagtaagtaaacttacatgtacaacttaatagatgggtgatgggttggaggttaaacgagtgatggatcgggtgacgggtgaagaaattctcacccaccactcgctttccatccatttaaattaggtttttcatccatttaaaaaaccgggttaaacaggtgatgtatgatccatcacccatttccatcctcaaacacatcccgatttgtttactgcaccaccagatccaccagtataaccacccgaaaaatcatcatgccttctactagccttgtaacctgctcccggtgagaagcttcttccacaagtggtggtcgctggacctccatctccttcttccccaaaaaattttccatgacacccactcgacccttcatctgtgacaacctcttcttcgtccacctctgaagttttggggtcgtcttcctcctcaagctcctcttgaagtaactttaacttccgttggatgggagagaacgcttcattgattatcttcaccagatcttcttgaagtttctcgaaactttttctcacgttttcctctacctctttcgtgatttcctttccgatctccttcatttttagactaggagctcttgcgattccatggcagatttctttttttaaaacaagaaaatcaggcacttaatctcccagaatagtggtgctctgataccattttctaagaaccaagatgactcttagctaatttctcagcataacaacaaatttagagaaattaagaagaattactaatgaatatttaaagagaaaactactaagatatgattgtattgatgaaaaacaccgattacaacctaaccaagaggttggagctctcccaagtaaccatttctctcactaaacttatcaattttcaagatgccgtttactactccccttagcaaactacccaacttattccccaataaactaaagagataatatctaaaatacccttccccctacaatattagttcttagcaccatcaaactgggatggatggttttgtaaggttccaatttacttctccatcaaaatattttaggattttttatctcatgtattttagagtttcctcgtccctttttatctgataagattcttctgatgatttgattttatggtaggctccaatcagcaatattaaagaactgaagattctgaaagctggagttccattttcacttgacttcattccagaggtttgtatttttatagtggttagacatgcttcccctagttttcaaagtaaaagcatccttgttgtgacgatattttttcccttgtttttgtttttattattatcatcacttatttccattttctattttccatgctgataagatgttcatcaccataatcttgtggtatcagaagtgtttagtggagtttattcactacacatgcagttgttcttttgccatgaccgccattcattttctcgtcaaaacaaatctatgaagtttggttttcagactcatggttcttgtagctcttgtgaatttttttttcttctccttgcatgcattcttcaaattacatattgcatataccaggtgctctcctttattttatatttaatttttaaaattctatcatatattttttaatgtcaaacctcaaactaggggttcactgcatcttaggcttaccaggctaatatttctttacttaaccttttccctttatatttgctatcctcttgtgtagtaatcaccataagaagggtacaaactaaattaccctcccattcttttgtatcattctgaaatagtgtcacagagctttgatttttttgccctcatttaatctggcaaatgttctctctatttttttttttttactttcttttgacgggattctcaggcaattgttacggggagcagccagtcacactgtttctgtttattatgcaggtgagttacctgcccctctctgttatgattactgcgtttaagaagaccagcgttacaagacctcttgagggcttcggagttcttatcccttcgaatgagcaacataatggactgaagactctcggtaattgtctggttcacgtgtgtagcgaatcagattttcaaaccctgatttcgtaacattgcaggtactctgttttcatctatgatgtttccagatcgtgctttctccgatatgtatctctatactacctttgttggaggaagcagaaatagagaacttgcaaaagcttcaacgtatgagatatgcaatgttttaaatgtatgctatagtcatcgtttcaaccttttggtgcctttttcttactaatttatcctcctggtttaatgatcttagggatgaattggagcaaatagtttcgtctgatctccaccagctgttgggcactgagggaaaacctacttttgtgaagtattgatatctttcacccaacttaacatgatttgtgcttataatatgttaaataaagtaactgaaatcctgaaattaagactacgaaactgtatggtgacagtcatttttactggaacaatgcattccctttatatgggcacaattacgactcagttctgagagcaatagaaaagatggaaagagatcttcctggacttttttacgcaggtaatctgtcatttgcttgttgcgataaagttcatgtacagttggcatatcaatcaacttgcattctttcttgctaactccaaacaatcaggatcattaacttgtaggctgcagcaacagagagtatctcccaagttgttaggtttcatgtaacctcgtcgctgagatgaaatttccgttggctaaaaagtgaaagttttgtattgatgttacccaaaacaaaagtattttgcatgttgcttgaagttttggttgtttcagatagtacatcctttgacatgaaaataaatggaaaagcgtatgtcaagcaattatcatctagtttctttgtttctagatactagccgcatttgatcccagatcatttttgaggaagtcagctgaaataccgtagctatccttcagttttcataataaaactttaatggatctgatgtacagtaatttagtgtgcaccgggttaataattgatattaacttcatatagtgagtcttataaagatataatgaacttatatacaatatagtggattttattaatggaaaacatatagtgaaactatatgcaatatagtatgatacataaagacttagacaacaagagcattcgaaattacaaagaacaaaggaaagaacaattgtatcaaaccggttcgaatgaacaaacaaccaccacttccacaatcaatgtaccaccaatcaagactaaactataacaatgagcttctagtttaagtctactttgagttttaatcaccaattcaacgattagatgatcaaaattgcaaaggttaagagttggtcaaacctaaccaagagttacactaggcacatagctttgttaggagtatattagtttatgaattctagttaagttagaaatccaatacctagttggattaggattcctaattggattagaattatagtttagttagaattctagtaatagtaggcgtgtgattaggagatataattagcttaattcttatattgttagtttaattcttatcctcgttttaggtttatctttagtcgaacttgtaccctatataaggggcctttatttcattaataatatagtttattttgagtttaaacctttacttgtgattgtttgcttgagaggttattaatcgaaccattaataacttttcaggattgttaagtttttagtgttaaacatcttaatttcaggagtgattttaagagtgtttagattcttgtattcaagtttcaggactgatcttgaatcaagaaatatccctagtttcgactaatatcataagtagttcgaattcttggagtcttttcttcaagattcatattcataacttgattatttagacttcttggttttgtaatcatatcaagtggtatcagttttccagggaggagaggatacaaagggttctctttgatcaaagaagatccaagggcatcaataagaatgacacttgcaataagttcgagtgatacaaacaacttcaagactcgatcttttgctaccaagaaccaatcttgacgcctgaagattgttaggacaaaggataagaagtgtttctacatccaagattgcattctttacgtccaagattgcgtcaagatccattctttaagttcaagaaaggagtagaaagcattcgaacactacttaaacatgacatccgagatggataagctggctatggccatgagtgccttggcacaatcacaaactgagtcacgcaaccacatgggtaggatggaggcacgtgaccgtggattgaaactagatgactatagtggagatggcaatccagaagacttgttggagtggatttgccaactaggcaaagtgagtgattataggggctttgatcacaagaagagattcaaggttgcttccattaggctcacgaagtatgctggaatacggctcgaaggattgcatgcacaaacttcttgcctaatgactatgaacaaaaacagttcataaggctcgcatcaataagccaaaacacacttagtgtacacgaatacagcatggagtttgacaaattagggcttatatgtgacatagaagagaaagagcaatacaagattgcaatgtacattaaagggttgaatcgatatatagccaagaagatcgaagtctcaacttatcacttctttgaggatgtgactaaattggctaagaaattcgaagagcatgacaaagaagaagggcctaagagttcttacacacctaagtatgactctagtgctaaagggaaatcaacagttccctactcaaggtggtcggaaagacctaagaaccccactacacctaaggaggacactagcatggagaagacaaaagtggccgtacctaaggagagtttaattttgtgttttatacatctttgcttaagagcttaacaattgaaactattaataacttttcaggatggttaagtttttagtgttaaacatcttaatttcaggagtgattttaagagtatttagattcttgtattcaagtttcaggagtgatcttgaatcaagaaatatccccttgttcaactattataattgatcttattcgagttcttggagttaatttcttcaagattcatattcatacttgattattagacttcttggtttagtaatcatatcaatatcattagcattaatttacccccagggagattaagaaaggattagcctaatcaaggcgcttaagaagtttttaggaaaaatcgtgcttgttaagcttaagaattgaacttctttcaccatttgcccttgattctcttgttgaactagaagatcttggttcatagtagatgctcctgcatcatagtagagcatttaattttaattttttaacatgcacgaagatgtaggtagtgtagtatatatcgtgagacgtggtttaacatatagaaagatgtagtttctgcatgatatagtgagtttttgcatgatatagtgaatgtctgaatgatacagtggatcgttccgaattgttgtagtttgtatgatatagtatttttgtgaatgatatagtgagtttcttcatgatacaatgggtttctgaatgatatagtggattgcttagaaatgatatagtgagcttttgtatcatgtagtaggtttctatgtgatataggttgttaaaagatgatacatgcttttggcctcatgtactctaatgttaacgtgaacccggtccttgcaagtcaattgcagttttttcaatattaagctatttttttttttttttttttttttttttttttttttttgtacgggaatatttagcatctttaccacaaacataaccatacgaatattatgcggaaattccagtctgaagtcttaacttttcaaaattaaaagcttctatattatttttggaatgaaaaaaaatgagctatggcatgttattttgaaatacaatgagtctcaaggtgcatagtggcttcaattctacgaataatgaatggactactgatttctaattttttgttccgggcttttgcattaggtaaccataaagatggactctctgtgggaagaactatttcctctggatacaaagctgcggagcttgtgatatcctatctcaactctacttaagatgcctaaatgatcgaggagactccgtaagtcctttctctgattctatctttgaactgagtggaaacacgactgtggtctaaagtagttgatgtctcagatatccagaaatggcgttagtgatattcaggagctgtccattgaccctttgattcattgttgcagtttactgaaagttgttagctggtctcagaaaaacgaaaggaaaaaagggggaaaacaaaaacaaagaaacgtagattgtggtgttaaaatcaagaattccagagatttgtaccttctttatcagttgaattgtttacagtgtgaatcaagaagttagctcgaccttcttttcttgtgaatggtaagatttcgtgatcatcaatacttgattgtgctgtttgcaacttcaacggtaagatttcctgatcttacagtttaattgcttgtgctgtttgccactt

SEQ ID NO: 17 - DNA, 1575 bp, synthetic construct
  misc_feature 1..1575: note = R126I mutated Beta vulgaris PPO2
  source 1..1575: mol_type = other DNA
atggtaatgctatacgattctcacctctcaggagtctcaactcatcttcaactatcgcaggcatttcccaggaagaacccattaatggccaaagtgtctgagccgggtaaacccacttctgctaaaaggattgctgttgttggtgctggtgttagtggacttgctgccgcatataagctaaagtcccatggcttgagtgtgacattgtttgaagctgatactagagctggaggaaaactcaaaactgttgcaaaggatggtttgatttgggatgagggggcaaatactatgatagagagtgaagcggaggtcacgagtttactcgatgatcttgggcttcgtgagaagcagcagtttccaattgcacaaaacaaaathtacattgcgagagacggtcgtcctgtgctgataccttcgagtcccattgcacttctcaagagcaatatcctttcagcgcaatctaagctacaacttatgttggagccattcctttggagaaaacgctatgcttctaagatttctgatgagcatgctcaggaaagtgtgggtgagttttttgagcgacattttgggaaagagtttgttgattatctaattgatccttttgtcgcgggtacaagtggaggagatcctcagtctctttctatgcgtcatgcatttccagaagtatggaatattgagaacaagtttggctcactaatttccggattaattcaatctaaactgtctccaaagaaggaaaagggtggaggaggaaagccttcttctaatgaaaagacacgcatacgtggttcgttttctttccagggtggaatgcagacacttgttgacacaatatgcaatcagtttggtaaagatgaactcaaactacagtgcaaggtcctttcattgtcctacagtcataaggggatcccttcttcagaaaattgggtcgtgtcttctgtgtcaaaaaattccattgaagatcaacaatatgatgctgtcatcgttaccgctccaatcagcaatattaaagaactgaagattctgaaagctggagttccattttcacttgacttcattccagaggtgagttacctgcccctctctgttatgattactgcgtttaagaagaccagcgttacaagacctcttgagggcttcggagttcttatcccttcgaatgagcaacataatggactgaagactctcggtactctgttttcatctatgatgtttccagatcgtgctttctccgatatgtatctctatactacctttgttggaggaagcagaaatagagaacttgcaaaagcttcaacggatgaattggagcaaatagtttcgtctgatctccaccagctgttgggcactgagggaaaacctacttttgtgaatcatttttactggaacaatgcattccctttatatgggcacaattacgactcagttctgagagcaatagaaaagatggaaagagatcttcctggacttttttacgcaggtaaccataaagatggactctctgtgggaagaactatttcctctggatacaaagctgcggagcttgtgatatcctatctcaactctacttaa

SEQ ID NO: 18 - protein, 524 aa, synthetic construct
  REGION 1..524: note = R126I mutant protein of Beta vulgaris PPO2
MVMLYDSHLSGVSTHLQLSQAFPRKNPLMAKVSEPGKPTSAKRIAVVGAGVSGLAAAYKLKSHGLSVTLFEADTRAGGKLKTVAKDGLIWDEGANTMIESEAEVTSLLDDLGLREKQQFPIAQNKIYIARDGRPVLIPSSPIALLKSNILSAQSKLQLMLEPFLWRKRYASKISDEHAQESVGEFFERHFGKEFVDYLIDPFVAGTSGGDPQSLSMRHAFPEVWNIENKFGSLISGLIQSKLSPKKEKGGGGKPSSNEKTRIRGSFSFQGGMQTLVDTICNQFGKDELKLQCKVLSLSYSHKGIPSSENWVVSSVSKNSIEDQQYDAVIVTAPISNIKELKILKAGVPFSLDFIPEVSYLPLSVMITAFKKTSVTRPLEGFGVLIPSNEQHNGLKTLGTLFSSMMFPDRAFSDMYLYTTFVGGSRNRELAKASTDELEQIVSSDLHQLLGTEGKPTFVNHFYWNNAFPLYGHNYDSVLRAIEKMERDLPGLFYAGNHKDGLSVGRTISSGYKAAELVISYLNST

SEQ ID NO: 19 - DNA, 37009 bp, synthetic construct
  misc_feature 1..37009: note = R126M mutated Beta vulgaris PPO2
  source 1..37009: mol_type = other DNA
tattccatcgaatgtagcaaattgactgtccgttgcaatttcggagtttccactcgtcgcatggtaaatggtaatgctatacgattctcacctctcaggagtctcaactcatcttcaactatcgcaggcatttcccaggaagaacccattaatggccaaagtgtctgagccgggtaaacccagtaagtcaaacattcgaatcacaactcaagcaaatttgtcttgtttgcgttatattttgctcatttcagccttttttgtttttccgacctttgcatactgaatattgtgtgtgtgtgtgtgtggggtttcagcttctgctaaaaggattgctgttgttggtgctggtgttaggtaaattttcgtctcttgcagagtttttgagtcatttgggaattctatgtgaaacttgtaactcccttcagtccaacgaacgcagtacaattttctatcaaatcatggtcctaatttccaattttccatatatattgttggaattatattgggattgtctatcactattaatagtattaggatcaattgtagagaagcacagaaatttttgggatcgaaagaatatctggattgccacattaacagcagatataattcttccaattggtttttggttcttcctaccttgacttgtctggtcaaacattataaactttaacctttaatatccattaaagtaaactataggatttttttgtctaaaacatgcttatataacatgaaatttgtgagaaaccaccttatatatatttttttgcgaaaacaaaccttaaacaaaattattatcgtgagaacaaaccttatgccaatttcgatcattgacccaaggttttggcattgaccgtgtcatgaattttgttgggtttaaaaagtcatgtgtcttgcatacgaaatggtaaatgcgggaaccttgggtcaatgtttggaatccgcataaggtttgttctcccaaaaaatgtttttgttcaaggtttgtttttgcaaaaaaacttatataaggtgctttctcagaaatttcatgttttataaagtagtatttgacaaaaaaccctaaaatatattatagaattattattgactaaattgtgtaaaaatgtactcttctaaaagtacattatagtattttagtggaacatttgcgagaaactactttataaatacgatttttgcgagaaatttcctaataaaaaaatgtgaagtgcaaaactatcttattgataattttctactccctcaaatccaaaatactatgaagtctttcctttctggtttgtcccagattagtttgtacgcttccatctttggtatgatcccacttttattatacttattagttttacgtgagttccttactctatctcttttaacaaaaatactcaactatctctatccaataaaaagttccttactagtcctatcacatctgctttttaataaaataacgtttgataaccacacaacttatatccttaaaatacacgttcaaccaagtgttgagattaatttggacggagggaataaatattttttgaggcatattggtagcagtattcggattccgataggttgactatgtttccaatgttgaccaacacttgccttgcatgtaattctaactttgctcttttttattcttcatttccctcgtattccatatacaatgtttagagacccattccttcctcttctcttctttcccttccttactatgctttgccataatcttcctcaaatgagtgcaaattaatttgtcgttgatgtaggccaactgattgtagcacatcttcatagttcatacctcaacacactcgtaattatattataccctacatgttaaatggctcatgaagctttattttatatcatacttcctccgtttcacaataagtgtaacacttttcttatttggaataatcacaataagtgaaaccaagctccaaatggtaagaaaagttcactcttattacaaatataccaccaaaaagtaagaggggatcacaacttcaatacttcttcactctactttattgtggtcccaactttctctctctaaattccttggtaactccccactttctctatgtttcacttatggtgaaatggaggaagtattttgtagtggtatttagctactaggccttggatgatatacaatcatacaatgtatttatattcacgataatttgctgcccaccttgattaccatgatttccaccaattttatcaatttcagtacttcaccaccccgaatttatattttttatttccaaccttggtatctccatttgtctgagtgcccgatccatttgtatcgcctccagaattgaagaagcttcctgcagctagacaattaggaaggttaaaaaagtttggagatggtggaggatagccataataatcattgttgggaggtggaacttggaaggttattgtagggttgaagtccttgatgaagaagaattgagttcaaatgagaggaaaaaggagcagggaagagggacaataagaaaaaaaagggtaaactaaaatcacgtgtaaggcatgtgcagatcaacatcagaaagcatagtcaacctactggtattagggcactgatacctttttgggtcaaaatttttttacaaggtatttcatgaggtagttttgtccatttttttttttacaaggtatcgtctcattttttttttatcatttagtttctcgcaataagtgtatttcatgaggtagttttttccaaaatttcctcatttattataaaatacctcatcttttccataaataatgcaatgtctagacttttacgctgtttacacatgctcctttgaccatctattgacacacaaggaaaaatagagtagagtcatgcaggatcttgttagatttttctcgatatatactttcaaaagatcaatttttttataattttttttttgaggggattttttttttataattatgtacttatcaaaggtcaaagttgtgcaccgggaagcataaaactctatgtgttgcaatttacatggaaggggaggagtataataagagaaaattatggtaaaaggttcattcctggagatcatgagaaaggaagtagaaagaacaaaaaagaacaatgggagtgcttttcaatgtttgttgtacgtagcatttattcatttgctataatgttttgtgacattgtagtggacttgctgccgcatataagctaaagtcccatggcttgagtgtgacattgtttgaagctgatactagagctggaggaaaactcaaaactgttgcaaaggatggtttgatttgggatgagggggcaaatactatggtaatgtttttgattattgcaggtcttgcactttagcgcacaattaatttctggatttttttttgtactgtggtggttatggtcatcaacatgtctcacccactgtgcttgcagatagagagtgaagcggaggtcacgagtttactcgatgatcttgggcttcgtgagaagcagcagtttgtaagtctttcattatctgaatggcacatactttatttcgaaagattgtaattgccttttctttctagatggcttcatcttcatgttgctttctgattcagtttcgtggctaactttccaagtttgtctgattgctaactctgtcatagccaattgcacaaaacaaaatgtacattgcgagagacggtcgtcctgtgctggtaagtttgcttgttttacttttgacctcttttaagatctttcaactctggagcctggaaacatggtgatgcaggaggcaagttctctctattttacatcctttcttctctgtatcttatgacatttgcctcttattctgtgcagataccttcgagtcccattgcacttctcaagagcaatatcctttcagcgcaatctaaggtcgttttatgttaagacatacttgatgctgagagtttattgaattcttaaccttcttcttattttttttttatttttttagcaaaaggtaagtatattgcatttaccaaaaaacagtatgtacaccaccacagcagccatgtcagaatctagaaataccaccgaaaaaatcctacacccaaccagagacagttatattatatcctactcctaagtttctgtacccaatttacatcaatattggtccatttacaagatatttttataattcacagaagcacatcagttttaattagtttaataatgacctctggatgaataaccaactcagaccatatagccttattcctggctttccggaagttgtacgccagagcagcaagcacagcaatgcaaacctgtttcttatacctccttttatgtgtcttagcccatctcttatagctagtgaagatacagtcgtgtgcacaggattgaaccccaatccaactagcgaaagcctcacaacattatgactataaatacatctgaagtataaatgctgcacctttttctcctcttgcctgcacggtatcagaacaaatcccagctttagctaacaattccctggttttcagtttattcaatgccatcatgcaagcaatgaaagaatgttttggaacattcagtttgttccaaacacagtgagagcaagggacctttcctgcagttccacttagccacttatatccctgactaatagtatgactctttgcaccgtaaattgatttcaacttaactttttcataagcagtgaattgtgtgttgttagagtgtctagctgtctaggagattgggagaaaaggagggaccaaggagatagaaacacacctttgtgtttctttgtgtatttactttttagggtgggtcacgttttctgagaaatttgggaaaaggaagaaatagtaacacactttcccatttgtataacctgtatactggagctccaatataatttgcatttttttttgagctgcaagaatatgttgacaaacagttattgcttcttcctcagctacaacttatgttggagccattcctttggagaaaacgctatgcttctaagatttctgatgagcatgctcaggaaaggtaatgtcaagacatgtgttacctcgccttaattttcgttccaggaggtgagcatgcatttagaactaaaaggcacaaagactgttggtggtcttgcctgttcaaatataatggagaggagttttcgctacatttaccctctcttgaagtggggttgaaatatagcatcaagttgaatgcttgattaagtttaaaggacttgtgtaactctttttctgtttactgtgattacatgacctggttgattaacataatggtctgtttatctgtagtgtgggtgagttttttgagcgacattttgggaaagaggtaatggtttaccatagtatttctgctttagtggtaaattgtaatgttgctgataattatacttcgctgcagtttgttgattatctaattgatccttttgtcgcgggtacaagtggaggagatcctcagtctctttctgtaagtgaacattttgtgcttcactcccaattttttggaggctggaaatagattcttttccagttgttctgtcaaaaatagatgtagctttattttgaatttgaagttcccaattgttcattttgactattactgattattgctaagagtggcattatgctattatgctcctaaaagaaaggtgaattttgacctacatatagtataatgtatcaatattggtttaattgtttgttcttttgttccttttggtgctcatcttgcgccttgttctcatcgctcgttttttcatgttgcacttgatttaaatttgctcagcttaacttgtctttttgaatttatattacttattgctatattttactaatttcgttgaaactaattttttgctgaacttttcgttttgttgaaatcatttttctgaattaacttgattttcctgaatagaattgaattttggtgatcttaccttttctgcagccttttatttctttcttgtcctttttccaatctcatttttttatatttccattgtgttgacatcttatcattaactgtgcagatgcgtcatgcatttccagaagtatggaatattgagaacaagtatggaccataagacgtttattttaatcgacatgtatgtttcttagtttatacatatattaattctgtggtaaaaaaaccgaacaagaatatctttttttttttctatcatcaaaaagggtgaatatatgtagaggaaaaagatttgaatcaagatattagcctaaagcaataataatgttagtaatagctttaataacaaattcaaaacgtacattaatgaaccgagaggccggaaaatagttaaagtgaccactaagagaagcgaaggattcatgatgggttttcaacccagtagggcaaatttgttcaatgttctttacaaatcaagcttattaccttgtgggtgtttttgctagagatgaatgatagaattttccctagttggaagtcttttttggttactttatgggagctagtgatgtaatttgtttcgccttatggcatttcctaacatgtgcttttgtgatgtattgaagctttttttttgccttaatttatgctggattttaattttgttctttgtttcatttttcttgcttttgaaaaaaatatatagatatgtatatattaggattggtcgaggattttgagggaagggaaagacctaagaaaacttggatgagggtgattgatagtgatatgagtctatttgggatcgaagaaaatattcctttggataaggtgtagtggagggttgagggagcaaatttatgcagattagcttgacttaaagtttttctttttgattatttttcatttacttgtgttttgcaaacatttactcatgaatgatgtaaacttcttcaaccaaatctctggaaaaaaataatctacatggaaaaaacattattaatgttaacttgacagagatcccatccttgtgaagcagctagcaattaggcatctaacaattgacattttaatggacaggatagaatgtctcttgatagtcaataccctctgtttcattgtatcccatagctactaatctagtttgtatctttccaaagaaccattattttgaagtttcaccttgaacacccattttgaaccaatatgtttcttgcccttggggagaggggctaattgccatgttttgatgcggatgcaaagacacttgttctacctgagcctattgacttgatcatggatactctagggtttgaactcaagggaaagaatcaagtcttggcatgtgtggtgacatggcgtggggatggagtaaagaagagtcatagttctgttaggatatgttcttgcttgctacatagaatcgtagttctgttaggattgctatgatattatatctagtagatagattttatagttaattaggataaacatgtgatgatcatgttataataggcatgtgattagaggataggattagcttaattcttatcttgttgttagtttaattcttatcctagttttatgtttatcttagtcgaagttgtagccatataaagggcgttccattcattaataatacttagttttgctttgtgttttaaacatacttcttgattattgtttgcttgtgagctaactaatcaaaccattaaagacttttcaggagttttagtgctaaacatcttaatttcaggagtgattttaagagcgtttagtgatcttgaatcaagaaatatccttgttcttgttcgactaatatcagtggttttgttcgagttcttggagttaatctcttcaagattcttattcaacttgattgttgagcttattggtttagtaatcatatcaagtggtatcagttttccagggaggagaggatagataggattctctttgatcaacaaagatccaagggctatcaacaaggttcaaacattgctgcttgttcaagacttgatctttttctaccaagatgcattctttacgtcacaaggtagtaataacaagattaagagtggtttttacatccaagaatcaatctttcacgtccaagatttcatctttcacgtctaagattcattctttaagatcaagaaagttataacaagcatagaagaacacataaccatggagtccgagatggacaagcttgccaaagctatgcaagcacttgcaaagtcgcaaactgaatcacagagtcgactcaatgagaatactaccacaatcaatgggattggtagtaacatgaataggttggaggcacgcatggatgccattgcaaccatcatacaaaagaagcttgatcggaatagtgccaacttcataggtgccaattcagaggaagagttggcagaacgtgaagaaagatcatccaagactacatacaatgatgatcgtggcttaaagttggatgactataatggagatagcaatcgagaagacttgttacagtggattcgacaacttgagaaggtatgtgattatagaggctttgatgacaagaaaagattcaggattgcctccataagactcacgaaatatgctggaatttggcttgaaagcttcaaggcacaacgagccaagaaaggtaaagaaaagttgtgtagttggacaaagttgaaagttcaagcttaaagagaagttcttgcctagtgactatgaacaaaaatagttcataagactctctactataagccaagacacgcttagtgtacatgagtacaccatggaatttgacaagctagggcttatatttgacatagaggagaaagaacaatggaagattgcaagatacatcaaaggcttgaaccgccacattgccaagaaggtggaagtatccacttatcacacctttgaggatgtgacaaagttggctaagaagtttgaagaacatgagaaggaagagaagcctaagagttcttacacgcctaagtatgatactaatgctaaggccaaggctagcttcctactcaaagtggtatgaaggacctaagaggctaagaacctcaccccacctaaagaagacacaagagttgagaagcctaaagtcgtcgttccaaaggagaaatttgaagagatgagaaagtgcttcaagtgtcaaggaaggagacacatagcaagcaattgtcctaacaaaagagtcctcaccatgagacaatacctagctttgcaagaagaggaggatgtctattagttcgtccctgatgaagagcaaacttaggggaagaagaggaggaggatgcttttgctgaggatgatgcaaggctagtaggggtcaagaggcgcaccttacatgtcgaccatacacctagcatggagcaaatggaaaaatcttttccacactagatgcaaggtaggtgactatatatgtaatggtataatagatagtggttcttgcactaatgttattgtatctgaggtagtgtcaaagctaaacttagctacaagggcacaccctaagccatacaagttgagtttgctagatgatagcactggcatgagagtaaagaaacaagctttgatttcattctctataggggttataaggatgagttatggggtgatgtattgcctatgagtgcatgtcatctcttgcttggaagaccattgcagtttgataaaaaggtcatccatgagggggactctaatgtgtactctgtgttggttggttctaagagggtatgtttgcatcccttagctcctcattcagtggcgccaaagcaaccacctaagacaccaagttactttctatcttcaagggagttcgaacaagaggtggaggaagaaggttgtgcttatgccttgattgtaagacatgctgccacaagtgtcaagactactagcaatgagaagctcgaagccttgatgaaagagtttgaggatgtctttctagaggaactacgacccttgagaggcatagaacatgctgtagaccttgtacctggcgcccctttgcctaacaagcctgcttataagtgtgatccagtggcatctagggaattgcaacgccaaattgaggacctaattgaaaagggctatttaagggagatcatgagtccatgtgttgtgccagctttactagttcctaagaaagatgacacatggaggatgtgcatagatagtagagcagtgaacaacattacagtcaagtaaaggtttcctatgcctagattggaagatatgttggataagttacatggggcatcaatcttttctaagattgatcttcgaagtggctaccaccaaatgaggatcagagaaggtgatgagtggaaaacaacattcaagaccaagcagggattgtatgagtggatggtgatgccatttgccttatgcaatgcgccaagctctttcatgagcttgatgaatgaggtacttcgtccgttccttaacaagtttgtggttgtttacatagatgatatacatatctatagccaaaatgtggaggaacacttgttgaacttgcgtagcttattcatgaagcttagagagcaccaactctatggtaagattgatggcgacgaggttgacgggggattatggcggcagtgaatcaccctctttgccggtcactgaaatacaacctgaggtatctttaaattctgtaattggattgactaacccaaaaactatgaaattgctgggaaaaattgctggatgtgaagttgtggtgatgattgaccctggggcaacccataattttttatcactagctactgttgagaaattagctattcctgtgtcggaatcggaaggatttggggtttctctaggggatggacaggcggtgaggggtagtggaatttgtagaggggtgttattgagtttaaatggtggagttgaagtggaaacagattttcagcctctgggtcttggtaattcggacgtgattttgggtgtacagtggctggagacgttggggacagtggagagcaattggaaaacacaaacaatggggtttgaaatcgagggtgtcaagttcactttgaaggtgacccatcactggcgaggtctcgaatctcactcaaagccatgatacgtaccttatgtaaagagggtggaggtttgtggcttgagttgaaccagattgagcattatcaggagaaaacaccgcattcatcagccttacctgaaattccagttttcttacagagagtccttacccaatttcagtctgtgtttgctacaccagaaggcttaccaccgataagagaacatgaacatgcaatagttcttagagaagggtgtaatccggtaggggtaataccgtaccgttatccacagttccaaaaagatgagatagagcgcctcatcaaagaaatgttggcttccggaatcatcaatccttccacgagccctttctcgagcccggtgatattagtgaagaagaaagatgggtcgtggcggttttgtgtagactatcgggccctcaataaagaaacggtccccgataagtatcccattcccgtgattgatgaattgttggatgagcttcatggggcaacacttttttcaaaactcgacttaagggccgggtatcaccagatccgggttaaggccgaagacactctcaaaacagcttttcgcactcatgaggggcattacgagtttttagtaatgccatttgggttgacaaacgcgccggcaacgtttcaatcccttatgaacgaggtcttcaaaccattcttgcgcaagtttgtcttggtatttttcgacgatatattggtctacagtagttctgccaggaacatgaggagcatttgaccttggtgttgcacaccctagcagctcataaattgtttgtgaatcagaagaaatgtgattttggcaggtcggaagtagcatatatggggcatatcatctctggtcaaggggtggctgtggatatggagaaggttcaagcgatggtggaatggccccttcctaaaaacctccgggaattacggggatttttgggccttacagggtactaccgcaaattcgtacttcactatgctcatatagccaagcctttaactgatcaactcaagagagatgcgtttgggtggtctgaggcagcaactcaagcctttgaaaagctcaagaaggcgatgatcacatcccctgttttggcaatgccggacttccaagagttgtttgtggttgagaccgacgcatccgggtatggtctgggggcagtgttaatgcaaaacaaccgacccattgccttttacagtaagttgttaggtgcccgggctcaattaaagtcgatctacgaaatggagttgatggccatctgcatggcagttcagaattggagatattatctgctgggtcgacatttcctcattcgtacagaccaacagagtttacgtcatctcactcagcagcgagaagtaagtactgccttccaacgttggatgagtaaacttatggggttcgattttgaaatacagtttaagccggggtgtgccaaccgggtagctgatgcattatcccgcaagacagtgggagaggttgaattgggtgcgctgatattaactcatggggtggactggaccgacttggagcgtgaaattgaaggcgatcctctgttgtgcaaaattaaacaagacttccacgggggtgctattactcctgtgcacttttctttggtggacaacaagctgttgttcaagggtcgatacgtgattcccagctcttcggtttttattcctaccttgctgcgagaatatcacgattctcccattggagggcattcgggggacctcaaaacatatctcaggatggctgccgactggtattggaggggcatgcgcaaggatgtggcgcggtatgtgcaacattgtagcgtgtgtcaacaacaaaaaatgtctcaacagatgccagggggggtactacaaccactccccataccttcctcggtttgggatgacttgtcaatggacttcgtggaaggcttgccatcttccaagggggtaaacaccatcctcgtggtggtcgatcgtttgtctaagtacgcccacttcctcccactacgtcatccatttactgctgtgtcggtggcaaatgtgtttgtcaaagaggtggttcgtttgcatgggtttccttcctccattgtttcagatcgggatcgaatttttatgagtgtgttttggcgggaattatttcgtttacatgacaccacactcaaacgaagtaccgcgtatcatcctcaaacggatggtcagtccgaaatcgtcaatcgagctctggagacttatttgcgttgctttgtgggggaatacccgcgctcttgggctcagtggcttgggccgaattttcatataatacttctcctcatctctctaccaaaatgaccccgtcaaggtcctttatggtagagaccctcctactgtgatacgggttaatcggggagcctcacctgttgaaagcttggaaaacatgctccaagagcgagacgcagtattagatgccttgcagattaatctgattaaagctcaacagaaaatgaagagtagtgctgatgctacaagaagagaggtgcattttaaggtgggagatcgagtgtacttaaaattacagccttaccgtcagaaatctttggcttaacgcccttatgagaagttagccgcccgtttctacggaccatttactattttacagaagattgggcaagctgcatacaagttacaacttcctgtttctagcaaggtgcatccggtgtttcatgtctcccaactgaaacaggccgttggttccattcccgtttcagccactattccagagcaattgtcttctgacttggagttagaggtggaacctgatgaactcctcgatgttcgtagtgtttctagaggccagcacacttacttggaagctctcattcagtggcagggattaccatcattcgaagctacctgggaagatgtggctgctttccatcaccattttccatccttccaccttgaggacaaggtgaaactttgggggggtggtaatgtgatgcaccaaactaccactccactactcacctattagaggcgtaagaaaaagggggtaaatcaggaatagtttacaaattctgttgaaaggaatattttgtaattatgatgtcagaggttgttagcaaaaaggcagtagagtaacaataaaaaggggaagggaggagagaagaaggtattgagatttttgtaaggaacttggcccttgggagagttgggagcctctcgaaagctcaccattatcttgtgaatattttccttcctggttatatacaagaaccttcctctgtcaatttcttttctctctaatcttatttcttattctgttttctggttgccattgtttgaagttgcttgttgtgcttgagtaaatacgtgaagtggtgaaacccatctgaattcatcacatctattccaagtggtataatacaagcttgtaatccaaatctaatgagaaatctaagttatgaagaatttcaaaagaactaagtacccttgttttggatgcccaaggatttacttgccgctcaagttaatgctcaacgtgcaagatacaacctctttagtatcccaaggtagtttccataagaattaattgagctcaaatcaagaacaatatttttatgtattaatgtgaacacttcctgaattatattagatatatggtctgaaggttggaagaaagattagcttttaattttaagtttgagatagtttttagaatcgaggaaagattagctcttaacttgtaaactaaggattgctttataagtaaaacattagttatggaactcttaaaattggttttgaacatttctagttaaaaatcccatgtaattctcccaaactagcttaaaatctcacatttcacaagctaaggagagacaaatggcgttctcttgtgaaacaatctaaaattttcattaggctactgttttcaagtatttatatgttagaagtgccgcatataggtacataaaataagtttacaaacacaagtaggaataaggaaaactaaaagagaaacttcagccatacaaaaccggctgaaatcagctactactttctactttctagcttcaaaatctgattgcaagtctcctttaagccaatcaccaatgaaaacctttcctccacatgaagtgtgctcaaatcaagagaagaaacccatcattcgcctatagctacctgggtcagatgaagatacggcaaaaaaaacgctggaaatcagtgaaccaaaataagcaccaattggatgctttctgtccttgctacattttcttctcataggactacttcaagccatacatgaataagcagttagatccagctcctagcatccatttgatcgtacaaatgagctccaaaaagataagtaaaaccaagcagccaaaacctaattaatactaatgatgaattagttgaatagctaatgacgatgaagcaacactttagtaggaatagtgttaattatgatcaatgctacttaatcttctgattaatttttggaaaaatgtcatatctaccttctgtatacacttattcataactatatcgtattattattatttttaaataactaccttttaagtaccaaaacctaagaaatcaggcacttgatggattccatccaaagatccatttggcggggcccactaactgacttttgattttttgcctttcctcttttggttaatctcaatggttcatcaataacaactcaatcttctccccatttcatcaaatcatccctaaatcagaactttttcaaattcacccaaatgaggttatggaaacctctaccaagtttattcgaccacttttagtctagctcaaagttttacacttgcttcaaaaactaagatttattaactttagaaattaggtttttatttttattttttatttaactttgtaacaatcttaaataactcaggtgctttctagagtttggctttaattgtttttcccttggttatgtgaaagaagtatgactactttctccaagactaaagtagagagcaaaaaatgcaattctggaatttcttgcaaaagaaaaggaacgagttaatgataatgaaaaacaaagaaaatgatgagaagagaggagctgaatcaatcatgatcatgtattttaaagttttttttgctattgaagtgacttaagaagaggaaagaggatgagtgaagacaaacaaaagaaaggataaatagagggaaatcttgggcttagaaaggtgaaaaggtaagaagatgagttagtgggccccaacaaatgtatctttggatataatccgtcatgccactgtttggggcttgcttaagtccatacattacttcactaattttacaaaatttattttcttgaccaagaactgaaaaaaccttcagtggtgatctattaggttttggaagttaaaaggtagttatttaaatgtttttaatataaaaggtagttatttagatatttttaatataaaaggtagttatgtgaataaaagtgtatataaaatgtaattttttgacatttttgccttagtttttcttgctaattcaccttttcaacttgaccaagttgctatgaggagaaaacgagcaattattaagcaaatcgcaacactagcattaatccatggcccatgaaactctccataattagagattggattagcacttagtagaacttcttgctcctgctccaggtttccattacttctttatctaagtgcatcaaaaggttgttgggttatgaaaggtggtggttgtgtatagtcattgtcaaaatgttgttaatgcactctatttagaggatgagggattgaatagttttcacctcgtgacctttcattcctttttaaaaaaattgataatgtgtattggtcctatgactgtatgaatggtaataagctatctcatgagctgttactatcttcctcagagtctaggtagaagggtttgggctgataattttctactatgtgcaattagtttgttggatttggatatgctagttgatataggtcctttcccttgggccttctcttaatataggcctacagtgtgattgaagataaatcttctggagaatataagaacaatgagatggattggttagaggttgatttgttcttttggtgtaagactatttcgggttctctattggttatgttcagacgccagaatatgtgttggtgattgttttccatgaacatactttatccgcagagacatttttcttttttcttcctataagattatatttgtttcctctcttggtgctcatctcagtgtctctactttacgttaaactgttgacattacttgacaatgcgtatatttgtcgcatggtgctcttccctcactccacgtcgaccccatacatcaaaaaatgccattaaagaatattcgaactcacaaccttgtgttgaaagaatggaatccctaccaatgactcattaattcattttctctttaagaaataaatgatttcctcacaaacttttaggctttaagagcccaaaagataaaaacataaaataagatagacatcaacgtcaagattagccttaaatgcacaaagcacatgtcaaatgattgataactactcacgagttgcaactctttgggcgttgcctaatattaattggatctcttttaaaaattgttggtggttatggttggtggagaggaccatgtaacttttagctggtcacaactggtaatgattgtcacttttactgcccataaaaaaatttaaactgttgaatatgtttctggcagtggatctgacaaatcctttacaagttggcgtccattttgttttgccatgtgactcaattataatacgtgagttttattatccaccaggtttggctcactaatttccggattaattcaatctaaactgtctccaaagaaggaaaagggtggaggaggaaagccttcttctaatgaaaagacacgcatacgtggttcgttttctttccagggtggaatgcaggtattagcatgtagctttcattctgttaacatttgtggttcttccagacatacatccaatgctttttttttttcttgctataaccataaacattcttgtcatgaacattctttaatactgttgctgagcttagtgtattcgttcattcatgtaatttcctctcttgaggttaaaatggcatacagccttacaacctatatccataatgctccttagagtagaatccctaggttataacatagtaccacttatcaaaataaacatggcacacactgcaggacaagaagtaaatccacctagagaactgagcacctagtagtaaaagcagcgatacattactaataacagtagcagggccataagagtagtaaatgggcctcatttcaacactccccccgtaatggtgagagagaagaagcagtctgaactcccagcttggagagcaaaatagagtgttgctgaacagggagaaccttagtgaaaacatctggcacttgatcttgagatggaacataggtaggctgaataaccccttcttcatttgtattgtccctcaggaaatgacaatctatgtctacatgcttggttttctcatgatgaactagatatgctgctatggcaagagcagcttggttatcacagtagataggagtagcactggactttttaatgcgaagatctttgaggagttgtttgatccacatcacctcacacacagcaagagccatggatctgtactctgcactgaccacaagaaattgcctctttgactttcaagatacggggggagtcaccaaggagcacacaaaaccagatgtagaatttacaacacccatcccattcactatcacaaaatgctgttagttgagcactagacttgttcgccatgagaattcaccctgttggcagcttgaagatgcacattagtggggcagtgcataaatttgcttaaatcatgtatagtgaaggcaatatcaggcattgccttgtaatagtgagataaatgagcttccccatcaatttttgatacacatcaggttgttgaagaggatcaccattgtcagcatagagcttgacatgtgagtccatacgaagcctcaatcgtctgcaatttataaaaccatattcatcaacaagacccatcacatacttctttagagataaaaacgatacttcactacactgatccacttcaatcctcaaaaaatatcttaggccacccatatctttcatgtgaaattggccagcgaagaaactctttgcttcctcaatagttgctaaactattgccagcaagaatgaggtcgtccacatacaccaatatagcactgaaacagtgagagttttgcttgaagaatagagagtagtcacacttggattaagtgaatacattttgctttaaagcagtgttagcttggcaaaccattgcctcaaagcctacttcaagccataaagtgacttaagcagcttgcacaccttagttcatttggtgtcacttctgccatcagtacttagctccccctctccttgaactttgatcctgttacatgtttcactatatcctggtgatagcttcatgtatacactatcctacaattcaccatgcaaaaaagcatttttaacatccatttgtttgcaagaaccaaccctctaaggatgcaacaacaagcatgtggtcatctttgctacaggggtaaaagtctgctcataatctattccatatctctgtctgtcacccatgattacaagccttggcttatgcctattatttgtgccatcagtgctgtattttgttctgatccatccatgtgagggatggctcatttctacaaaatcctagttccgttaggatttgtgttgttttcctaattctagtaggaataggactcctaaaatcctaatcctcctagttctgttaggagtttaaaagttttagtttgattgtaattctagttgtgttagaaatccaaatcctagattcatgtcacgtatggttagaacatggctagtaggataatttgtcttgtgatgtccatagccttggcatttgtggcacctaactttcaatagcttgtcttctgtctccttttctttctccttctttgaggaatcaacgtttttagagctatctaaaccactagcatcaatattaggtttaaaagtgctaaaagatttcgaatagttcttacttgcatacaatttctttttctagtttatgtagcgtcaccagggaacaaaaactcggccgttccgttctggaacggccgctttgtaacggatttcagagaggccgttccgttaaataccgttctagaacggtgatttggaattcacaccaaactcggcgcgatagcgttacgtaacggtgtaacggcgttccagaaccgttacaatcacataacgtccgttatttgaagaagaccagttcttttggtggaggaagaagaagagccaacgcaagatctatagatctgagttaaaatttgaaaataaaacatgtttttttatttaaattaaagcttacagaggatgtagaactcaaattcgagtaaacccctcctttaatttcattaggttactgcaaatcgaaccctaaattgcaaaccctaatttcgaaaaaaccctaatatgcattgggatgcaacgctgcttctccggtcatggcagagaaggtcgacgagtcatcttcggctgcttttagcactgtagctgccggtggttggcttgtttgcaggttagtgcttgctggttttctttctctcataccgatcatcttcttcttttctctcttctctttttcttttttattgtgtgactgccagtcacgtgataattgcaactcataaagtatctctttctctctcttcttttcatccctttttatttttctttcccttttagtttttattccctcacgtggaatcacctaattttcatccttttttatttttttagttacactcttacacagaagtatgttcaaatatcattatagtacctcaaatattgtatttataagagttttggacataatatgatatagaaagtaaaatagaagaaaaataaagtttaaatgtcacttgtgtgatttttttaaaaaaattcacgccgcgacggccgcgaaacgttctatttcccgttacaagccgttcccgcgataacgcgaccgttcccgcgaacgcgaccgcgaccgcgttttttttccttgagcgtcacatcttgcaagcttcttcaaaggtgagttatgtgtacaactccaatttctctccaatcccctccgtcctcatttaggcctccaaggaagctacttaaacattgatcttcaagttcatcaattttccaaagaatggataacttctcgaactcctttatgtaatcttcaacggacatattcccttgtttaagagtagaccattccatgtacaagctttgtttgtagttagaaggaacaaaacgtcctcttaacaactttttaagcttatcccaagtagagattttgggtttattagctttcacacgctgcctctttactccatccaaccaaatagatgcatatttggttaccttaagcacggccaccttgtatttcttttcttttggtgtctcttaatcccaagtagagcttttgcgtgtgaaagctaataaacacaaaatctctacttgggataatcttcttcttgtttccgaaacaactaattcttatggtagttaggaaagcaagaatggtttctaattcaatagggaatatattaattattattagtttaagttaaatagtgcacgaatctaaatagattattcgtctcaaaatctcacttaagtatagatttgtttggacatctgagggaagaagaagagagcgagataaaggagaattatcactcaatgaatccatatcccgagttttcccatttacttctttgaaagcaatatagttcacgaggtcttattatcagtctatggacataagagtaataatttaagggcaaaaactatgactttatgggtttaaactgatacatgttctgttaaactgatagatgttctgtgttaaaccgatactcatatattcctggttaaactgatagatatatgatttaaattgatacccgtctcagtcatgtcttggattgagacggtctgacacaagactttttgtgtattatatatctgattagaataaatttatcctgtttactaattattttatcttctccagacacttgttgacacaatatgcaatcagtttggtaaagatgaactcaaactacagtgcaaggtcctttcattgtcctacagtcataaggggatcccttcttcagaaaattgggtcgtgtcttctgtgtcaaaaaattccattgaagatcaacaatatgatgctgtcatcgttaccgtgagttttactttgcttactgctattgcaccaatctttcttcttttgacacactgataatggcaatgctgttgtggtttgaagccatgttatggggttttagggatatttatggagtctgatctaatatgttattggataaaattcagatctgtaacgtgactcaatgagattgaaaaaaattgaatcaagataatggattggaaaattaggagctaacctagggtctataagcgatccacttggagtctcataccaagcaggtattcgacattttaggtttatattgctgctatggctcatatgggagcctacatagggtctggtgcttattcctttttcttttgtctagttttggggctgcacatttctgttgtgttttgatatggatagccatcacctgcaattgcatggaggctgaactaagttctataggggagcaaacagtatctgttggaaatttattttcatattgtgtttttaaatgctataatccaaaatttgttgttcccctaaaatgcctaaaatacccttatgtaactgctccatctgtcccttaatagacttcccatttctccaatgcatgtttgccaatacacattttgtattgttaatatcaaaaattacatattagtaaaaattataaaagtttgattttcctaatgtacgcaatgagacgaatcaaacaagacgccatatgactatgttttttcttatacttcctatgttttttaataagtgacatgttttccttttagggaaatgtcacaataagtgacacatagctcaaagtagtaaaaatacttctcatttattacatctttgccattatttaattgtttcacctacctactttatccaatactcaaatttgattggttgaacaattggtcccaactttctctagactccttggtattccctttcccccactttctctctgtgtcacttattaaaaaatggaggacgtatattggaaaaaaattggaaggttttcttcacttatgaatagtggtaaaattagagatgggaaggctattttgggatggatggagtaatatttaaatttttaaaataatgtcattgttttagtgatgaaataaaattcaaggctattttttctagtaattatgttatctgtacatcaccacacgtatcgcgtgcatataagactagtttgatgatattccaacactgttcgaaggaagtcaggcatggaaccatgtttgcttccatatgggaaatattttgcttactctccttcaaacatctacctcattatcccagaatgattgatcgaatctaatacaaatatacaattgatcatatgccaccagggaattacatcaaattaaatttttatagaaggggaatcagtcatagcctcatagggaacgaataagtgatactcgccagtttctttcctggttacttttcctcttctcactagccatcctttatgtatgggtatgctgcatcattcctgccactggttgggactcccgtttgaactatggggggatgggaaagctaagccatcatcttcaaattgagtttcttgagaatgtaagacaccatctgtaagatgaatatagtgcactctatagtcaatgtcatgatctttatgggtttatctgctgaaataactgtgatatacccagctctccatttacaaagttttcctacatattaaactcttgcccgcaattctagaacttcattgtagaacttttcctacataagcatcatttgtcttttctgtagtaaaagttagaaagagctttattttagaacattcgtttttagttttctttgttgttgattactccgccacttttaatacttttatgattcaagtatttgacaaaatcatgtaatttaggtcctctgctgcatgcagtctataccctctctctctctctctctctctctctctctgtggttgtgtcttacttgttgagttactaactccagccattacataaagtaggctggcattatgatgagcaaattactcaagaccacatgttagctcctttttcttttctccttattctgaaaggcaaatataggtccatcttggtgcttctcatgtcataagtaagctgaccccctccttttccagggaataggacaataatccaaaagtgagggttttacatgttgggatttgtgaagtttcttattttacttaatagccgagtcagtgttacaatacatagtaccgtgttacaaaatagtatgtaacaccaagcatgtttatgtgcaaaattgtgcaagactttgttgctggcacgccaagggctgttttaatgtagtttacttattcttttaggtttttcagatgacaatcataaagggaattaggagtgtttttattgtagtcaatccctattgtgctacaacgataaaagaaaaaagcacaagactagaaggagaagtaatgtctaggaaagactcctcacctggggttgctagtcacctacacatcttagaaggcatcaaaccaaagcttattcccctcgactgttttcgggagaaaagaagacaaaattgtttctaacttatactttaccagtttcactacagcatcagaaagaagcaaaatatgctcccacaacacggcgaacctagctttccagatgtgataaaccagaccagcaaaatgattattttcactagagctttgagtctattttttcggtttttccccttcttcctggtaatgtcacgccaccaagccatcatctcaattttttgagatttgacgtaatcgctcaaatagctgagtaagacacttcttgctctaaatactaataaaaaagaggtgaatgtgggtctcagccatgttactcaaatcggataaagtgtctactcttattagggtttttgggtgttggactcatccatttttttttgtaaaatgtcaagattttggtttgaaatgagagattcaagtgtcgtgacatgagtcggcacgcaacacttaaacgtgtcgaagtaacagagggtctcagacaatcaactttaatcaatcacgaaccccaaaatttatgcaacctttgctcatattcagtctctgtaaagcactcaactgcagcacacccacccattcgcttcacctacagcaggagggcacccaagtaattgctatgatgagcgaattattctgttttgccttgctggaatattgctgttagatttgctgactcactggcagttaattatagtcagagaatgagaaatatcctgtagagagagaaagggtatcttttgtatttagctctataaatagctaaggaagggaagggcattgagagtttatgatattataataggagagatttagcctctcgaatgctgataggagcgtagctcttgttggattatcaatactactctgtttgctctatctatttctactcaggttccttcttgtacagtggatccctgattggatttacttcatcaaccagcagataaaattatttgtaggcacattgaaaccattccaaacctaatgaggccaaagtttatcacaaagaatataggagccaaatgtaggcaacagataagagtataattgccagaagttgaagactccaggtattgttcagaaaccttaatgcatatcatcattctgacactagattttccccggagccaactaacaaaaatgaattaaagagattaaggctatgtttagttcacctgaaattttctgatctgaacttatctgatctgatctgaacttattttttctgatctgatctgatctgatctgaaccaatctgattacaagatcttatcttttagatttttctcaatatataagaaaaaatatagtcatgtggggtcttgtttgattcgtctcaatgagtactttattaatattcaattattataatttttactaatatgtaatgaaagatataatgatttttaaatataagcatgatctgaactgatctgatgtgaacttattttttctgatctgatctgatctgattagatctgaaataagcaaaaataaggtgaactgaacatagcctaagcaacaattgagggaaaataagatcattatggctaagataagataaatatgtaatgataaaatcagagtaattatatcagttacactctcaacattcgtcagattgaggtttcctcccaaaatgccaacccacttttctgtattttcacgtccttctctctacccttctaggtatatattacatcagctgtaaaatttttgaaccaactagtagaatactgatctaccctcaactgcctcactttctcattttttctgggcctttttctctctagcacaagtccacataagtgatgcatagcagaaatataattccactagtcatcctcaatattgatataacaaacacatcacccacatattatcatttttaatcgctgcatgcgaggcatacttacccaccaatcaggatatgcataacagcgttcctaattccaaaaccaccatatatcttgggtttgcaactctcatccctagcaacaaggggactttctgaaaaagtggcagattccgcccacaagtagtttgtacggacacctttattatattattaatatcatatttcggcaacacaaattaccagcccagtaaaacatgaattgacatgagactaacaaggggcccaatctaatatcgtacgtctgtactaagcaatgtataaaaaaaagctcaaggtgcattgatgcaatagggatcctaatgtgcataggtgcgcctcattgaagtgaggcaccactaaggataaataaaaaagattgatgtaaaattaaattgtgcaccttgggtgcgcctcgatgaactttttttgtgtgcctaagtgtacctcaagtacgcctcattgatatcgcctcgcctggcagaaaacgagcttgaccccaatcgccttgctccccaccgcctaggcgtgcctcagtcacactttttaaatacattggtattaagtactcagaatggcaaaaagaaactttgggcattaattagacatttcactttttgtgcaactatttgtgacttcagagattgatatgttttctacattacagacttttgtgatggctgcatggtctccactgtcaaagaacattagtttaagtagaagaaatattgctctattaccttcctccctctacaaacaaaatcctaaaatgtggttatgtagtgccaattcaaacttgtagatgcatgactaatgctttcattatgctgtgggtttttatactatgattcatgtccaattacataacaattagctggagtcaggatatgtcacggaaattttaagcctggcaggatgattgtttatattttctctttttcggtgtttaagtcaaagtaaacttctaggctgctcttttataggctagttgggctgttggggagatctacacattaagtgtgaagaaatcttgtctaactccagtttggttgagaactgtaagctgtcataacatttgttgcatgatgaggccttgtgggattatcatgttagctgtaaactctaaacttacttgaaatctagtgttgtgtctccttatttctgtagtcaaaattgaaccttctgtacgtttttgatacctgcgactagaatgatggaattctgaattactgatactattacaaccatctgctaagaacgaagatgactcttagctaatttctcagcagatttagagaaattaagaagaattactaatgaatatttaaagagaaaactaccaagatatgattgtattgatgaaaaacaccaattacaacctaaccaacattcgagaggttggagctctcccaagtaaccatttctctcactaaacttatcaattttcaagatgccttttccattctcagttcctctatatttatactactccccttagcaaactacccaacttattccccaagtaaactaaagagataatatctaaaatacccttccccctacaataatattagttcttagcattaccggccccctaaacttccaccttgtcctcaaggtgggtcgtaatcatcactaaattctgggcctctactcgtatattcagtgtcttgcagcccttcaggccccaagcctaggttatgcagctcgtgttgcggctcctcctcatatagttctctggctggagtgagtgcctcaactataatgaaaaagtcctggaggtggggaaggaaggagtgtctgaaatggtgtggtgtgctgctggtgttatgggcttgtgcctgaaagttttgggtttaaagagatggagtggagaagagtggagaagtgactggagacgtaaaagaaggaatcataatttttgtaagtggtgggttgaaaaagttggtgggaagaattgtttttataaaatgtagtgtaatggtcgaaaaatgggtggagtaagtatggtttttggctggggatgtggtactgggttgaaaataaataggtctgagcttacttgtaaaattggcctcaacatgagcaggcccaatatcttgagccaattccccaaaagctggcaatagagcactcttaattgcattgttgtgggccatcgggctccaaacatatattcggaggagccggacttctttggtgatgtcattagcttggcccattgcacactttcccttaacagcctcaagatcttttcccacttttgtaccccaaccacgtggcttcaccatcctttctttcttgcttttgtcacttttttggcaatatacgagtttgtccttactaccctcatcttctaatgttggcttcctcaccaagcttaatttctggaattttgtccaccaaatcccaccacccatcgtcaacaccatacctatctacaccggccaagaagcctggtcctccacccgaattttcgccacagacaaagcctgaacaaccgtcagttctctcaccggagaagttcacaggtccaccacctgacccactagttgctgatccacccttcacaaatctccctcctctggctgccacaagtagtggttcctccgtaatactcatatttctcgtccaagagccctggaccaccaccggacccacttccaccggcaccaacttgttcaaatgatacttctctttcttttccaaacagcctacttggactggaaaaaccactgcgattgtagcctccgccagatctgtagcctagtgcacctaacgtgcttccaactgcaacccaatagggatggaaatggatgggattcggggagggtggagcatcacccgcatccgtcacccgcatccattcgctccacccgctccacccgcatccatccatccgtcacccacgggtgaaacgggtgggtcggtgataaacgggtggaaccatttagggggtgtttggtatcatgtttttttacaaaagaaacagaatcaagtaacaaaatccgtttctacttgtttggttctatgttgctcagactcgagtacccatgtccgacacgggtacgtgtccaagtgtccaactcagctattttctagaattttttatattttttaacccaaaacaaagtgtccaagtgtcccacccatgtccgactcccgaggatccgacacgggtacttgaggtgaaatgaagagtccgagcaacggaggtttggttagtgtgtaaagtaacaattaccgttacttgaggaaaacacatccccccaagttgtttccattcaaaaacctaaggaaacaaataacgtttcactcctcaaacaagaggaaagggaatgggttatatttatttccattccattaggataccaaacaactaataagggtaacacttattattatcctttcccctccttatcaaaatcctttccattccgtttacggtattcataccaaacacccccttagtatattttctaatgaaatttgtgatatgatatgcatgatataaaataattctatcaaaaatataaaaagtaagtaaacttacatgtacaacttaatagatgggtgatgggttggaggttaaacgagtgatggatcgggtgacgggtgaagaaattctcacccaccactcgctttccatccatttaaattaggtttttcatccatttaaaaaaccgggttaaacaggtgatgtatgatccatcacccatttccatcctcaaacacatcccgatttgtttactgcaccaccagatccaccagtataaccacccgaaaaatcatcatgccttctactagccttgtaacctgctcccggtgagaagcttcttccacaagtggtggtcgctggacctccatctccttcttccccaaaaaattttccatgacacccactcgacccttcatctgtgacaacctcttcttcgtccacctctgaagttttggggtcgtcttcctcctcaagctcctcttgaagtaactttaacttccgttggatgggagagaacgcttcattgattatcttcaccagatcttcttgaagtttctcgaaactttttctcacgttttcctctacctctttcgtgatttcctttccgatctccttcatttttagactaggagctcttgcgattccatggcagatttctttttttaaaacaagaaaatcaggcacttaatctcccagaatagtggtgctctgataccattttctaagaaccaagatgactcttagctaatttctcagcataacaacaaatttagagaaattaagaagaattactaatgaatatttaaagagaaaactactaagatatgattgtattgatgaaaaacaccgattacaacctaaccaagaggttggagctctcccaagtaaccatttctctcactaaacttatcaattttcaagatgccgtttactactccccttagcaaactacccaacttattccccaataaactaaagagataatatctaaaatacccttccccctacaatattagttcttagcaccatcaaactgggatggatggttttgtaaggttccaatttacttctccatcaaaatattttaggattttttatctcatgtattttagagtttcctcgtccctttttatctgataagattcttctgatgatttgattttatggtaggctccaatcagcaatattaaagaactgaagattctgaaagctggagttccattttcacttgacttcattccagaggtttgtatttttatagtggttagacatgcttcccctagttttcaaagtaaaagcatccttgttgtgacgatattttttcccttgtttttgtttttattattatcatcacttatttccattttctattttccatgctgataagatgttcatcaccataatcttgtggtatcagaagtgtttagtggagtttattcactacacatgcagttgttcttttgccatgaccgccattcattttctcgtcaaaacaaatctatgaagtttggttttcagactcatggttcttgtagctcttgtgaatttttttttcttctccttgcatgcattcttcaaattacatattgcatataccaggtgctctcctttattttatatttaatttttaaaattctatcatatattttttaatgtcaaacctcaaactaggggttcactgcatcttaggcttaccaggctaatatttctttacttaaccttttccctttatatttgctatcctcttgtgtagtaatcaccataagaagggtacaaactaaattaccctcccattcttttgtatcattctgaaatagtgtcacagagctttgatttttttgccctcatttaatctggcaaatgttctctctatttttttttttttactttcttttgacgggattctcaggcaattgttacggggagcagccagtcacactgtttctgtttattatgcaggtgagttacctgcccctctctgttatgattactgcgtttaagaagaccagcgttacaagacctcttgagggcttcggagttcttatcccttcgaatgagcaacataatggactgaagactctcggtaattgtctggttcacgtgtgtagcgaatcagattttcaaaccctgatttcgtaacattgcaggtactctgttttcatctatgatgtttccagatcgtgctttctccgatatgtatctctatactaccatggttggaggaagcagaaatagagaacttgcaaaagcttcaacgtatgagatatgcaatgttttaaatgtatgctatagtcatcgtttcaaccttttggtgcctttttcttactaatttatcctcctggtttaatgatcttagggatgaattggagcaaatagtttcgtctgatctccaccagctgttgggcactgagggaaaacctacttttgtgaagtattgatatctttcacccaacttaacatgatttgtgcttataatatgttaaataaagtaactgaaatcctgaaattaagactacgaaactgtatggtgacagtcatttttactggaacaatgcattccctttatatgggcacaattacgactcagttctgagagcaatagaaaagatggaaagagatcttcctggacttttttacgcaggtaatctgtcatttgcttgttgcgataaagttcatgtacagttggcatatcaatcaacttgcattctttcttgctaactccaaacaatcaggatcattaacttgtaggctgcagcaacagagagtatctcccaagttgttaggtttcatgtaacctcgtcgctgagatgaaatttccgttggctaaaaagtgaaagttttgtattgatgttacccaaaacaaaagtattttgcatgttgcttgaagttttggttgtttcagatagtacatcctttgacatgaaaataaatggaaaagcgtatgtcaagcaattatcatctagtttctttgtttctagatactagccgcatttgatcccagatcatttttgaggaagtcagctgaaataccgtagctatccttcagttttcataataaaactttaatggatctgatgtacagtaatttagtgtgcaccgggttaataattgatattaacttcatatagtgagtcttataaagatataatgaacttatatacaatatagtggattttattaatggaaaacatatagtgaaactatatgcaatatagtatgatacataaagacttagacaacaagagcattcgaaattacaaagaacaaaggaaagaacaattgtatcaaaccggttcgaatgaacaaacaaccaccacttccacaatcaatgtaccaccaatcaagactaaactataacaatgagcttctagtttaagtctactttgagttttaatcaccaattcaacgattagatgatcaaaattgcaaaggttaagagttggtcaaacctaaccaagagttacactaggcacatagctttgttaggagtatattagtttatgaattctagttaagttagaaatccaatacctagttggattaggattcctaattggattagaattatagtttagttagaattctagtaatagtaggcgtgtgattaggagatataattagcttaattcttatattgttagtttaattcttatcctcgttttaggtttatctttagtcgaacttgtaccctatataaggggcctttatttcattaataatatagtttattttgagtttaaacctttacttgtgattgtttgcttgagaggttattaatcgaaccattaataacttttcaggattgttaagtttttagtgttaaacatcttaatttcaggagtgattttaagagtgtttagattcttgtattcaagtttcaggactgatcttgaatcaagaaatatccctagtttcgactaatatcataagtagttcgaattcttggagtcttttcttcaagattcatattcataacttgattatttagacttcttggttttgtaatcatatcaagtggtatcagttttccagggaggagaggatacaaagggttctctttgatcaaagaagatccaagggcatcaataagaatgacacttgcaataagttcgagtgatacaaacaacttcaagactcgatcttttgctaccaagaaccaatcttgacgcctgaagattgttaggacaaaggataagaagtgtttctacatccaagattgcattctttacgtccaagattgcgtcaagatccattctttaagttcaagaaaggagtagaaagcattcgaacactacttaaacatgacatccgagatggataagctggctatggccatgagtgccttggcacaatcacaaactgagtcacgcaaccacatgggtaggatggaggcacgtgaccgtggattgaaactagatgactatagtggagatggcaatccagaagacttgttggagtggatttgccaactaggcaaagtgagtgattataggggctttgatcacaagaagagattcaaggttgcttccattaggctcacgaagtatgctggaatacggctcgaaggattgcatgcacaaacttcttgcctaatgactatgaacaaaaacagttcataaggctcgcatcaataagccaaaacacacttagtgtacacgaatacagcatggagtttgacaaattagggcttatatgtgacatagaagagaaagagcaatacaagattgcaatgtacattaaagggttgaatcgatatatagccaagaagatcgaagtctcaacttatcacttctttgaggatgtgactaaattggctaagaaattcgaagagcatgacaaagaagaagggcctaagagttcttacacacctaagtatgactctagtgctaaagggaaatcaacagttccctactcaaggtggtcggaaagacctaagaaccccactacacctaaggaggacactagcatggagaagacaaaagtggccgtacctaaggagagtttaattttgtgttttatacatctttgcttaagagcttaacaattgaaactattaataacttttcaggatggttaagtttttagtgttaaacatcttaatttcaggagtgattttaagagtatttagattcttgtattcaagtttcaggagtgatcttgaatcaagaaatatccccttgttcaactattataattgatcttattcgagttcttggagttaatttcttcaagattcatattcatacttgattattagacttcttggtttagtaatcatatcaatatcattagcattaatttacccccagggagattaagaaaggattagcctaatcaaggcgcttaagaagtttttaggaaaaatcgtgcttgttaagcttaagaattgaacttctttcaccatttgcccttgattctcttgttgaactagaagatcttggttcatagtagatgctcctgcatcatagtagagcatttaattttaattttttaacatgcacgaagatgtaggtagtgtagtatatatcgtgagacgtggtttaacatatagaaagatgtagtttctgcatgatatagtgagtttttgcatgatatagtgaatgtctgaatgatacagtggatcgttccgaattgttgtagtttgtatgatatagtatttttgtgaatgatatagtgagtttcttcatgatacaatgggtttctgaatgatatagtggattgcttagaaatgatatagtgagcttttgtatcatgtagtaggtttctatgtgatataggttgttaaaagatgatacatgcttttggcctcatgtactctaatgttaacgtgaacccggtccttgcaagtcaattgcagttttttcaatattaagctatttttttttttttttttttttttttttttttttttttgtacgggaatatttagcatctttaccacaaacataaccatacgaatattatgcggaaattccagtctgaagtcttaacttttcaaaattaaaagcttctatattatttttggaatgaaaaaaaatgagctatggcatgttattttgaaatacaatgagtctcaaggtgcatagtggcttcaattctacgaataatgaatggactactgatttctaattttttgttccgggcttttgcattaggtaaccataaagatggactctctgtgggaagaactatttcctctggatacaaagctgcggagcttgtgatatcctatctcaactctacttaagatgcctaaatgatcgaggagactccgtaagtcctttctctgattctatctttgaactgagtggaaacacgactgtggtctaaagtagttgatgtctcagatatccagaaatggcgttagtgatattcaggagctgtccattgaccctttgattcattgttgcagtttactgaaagttgttagctggtctcagaaaaacgaaaggaaaaaagggggaaaacaaaaacaaagaaacgtagattgtggtgttaaaatcaagaattccagagatttgtaccttctttatcagttgaattgtttacagtgtgaatcaagaagttagctcgaccttcttttcttgtgaatggtaagatttcgtgatcatcaatacttgattgtgctgtttgcaacttcaacggtaagatttcctgatcttacagtttaattgcttgtgctgtttgccactt

SEQ ID NO: 20 - DNA, 1575 bp, synthetic construct
  misc_feature 1..1575: note = R126M mutated Beta vulgaris PPO2
  source 1..1575: mol_type = other DNA
atggtaatgctatacgattctcacctctcaggagtctcaactcatcttcaactatcgcaggcatttcccaggaagaacccattaatggccaaagtgtctgagccgggtaaacccacttctgctaaaaggattgctgttgttggtgctggtgttagtggacttgctgccgcatataagctaaagtcccatggcttgagtgtgacattgtttgaagctgatactagagctggaggaaaactcaaaactgttgcaaaggatggtttgatttgggatgagggggcaaatactatgatagagagtgaagcggaggtcacgagtttactcgatgatcttgggcttcgtgagaagcagcagtttccaattgcacaaaacaaaatgtacattgcgagagacggtcgtcctgtgctgataccttcgagtcccattgcacttctcaagagcaatatcctttcagcgcaatctaagctacaacttatgttggagccattcctttggagaaaacgctatgcttctaagatttctgatgagcatgctcaggaaagtgtgggtgagttttttgagcgacattttgggaaagagtttgttgattatctaattgatccttttgtcgcgggtacaagtggaggagatcctcagtctctttctatgcgtcatgcatttccagaagtatggaatattgagaacaagtttggctcactaatttccggattaattcaatctaaactgtctccaaagaaggaaaagggtggaggaggaaagccttcttctaatgaaaagacacgcatacgtggttcgttttctttccagggtggaatgcagacacttgttgacacaatatgcaatcagtttggtaaagatgaactcaaactacagtgcaaggtcctttcattgtcctacagtcataaggggatcccttcttcagaaaattgggtcgtgtcttctgtgtcaaaaaattccattgaagatcaacaatatgatgctgtcatcgttaccgctccaatcagcaatattaaagaactgaagattctgaaagctggagttccattttcacttgacttcattccagaggtgagttacctgcccctctctgttatgattactgcgtttaagaagaccagcgttacaagacctcttgagggcttcggagttcttatcccttcgaatgagcaacataatggactgaagactctcggtactctgttttcatctatgatgtttccagatcgtgctttctccgatatgtatctctatactaccatggttggaggaagcagaaatagagaacttgcaaaagcttcaacggatgaattggagcaaatagtttcgtctgatctccaccagctgttgggcactgagggaaaacctacttttgtgaatcatttttactggaacaatgcattccctttatatgggcacaattacgactcagttctgagagcaatagaaaagatggaaagagatcttcctggacttttttacgcaggtaaccataaagatggactctctgtgggaagaactatttcctctggatacaaagctgcggagcttgtgatatcctatctcaactctacttaa

SEQ ID NO: 21 - protein, 524 aa, synthetic construct
  REGION 1..524: note = R126M mutant protein of Beta vulgaris PPO2
MVMLYDSHLSGVSTHLQLSQAFPRKNPLMAKVSEPGKPTSAKRIAVVGAGVSGLAAAYKLKSHGLSVTLFEADTRAGGKLKTVAKDGLIWDEGANTMIESEAEVTSLLDDLGLREKQQFPIAQNKMYIARDGRPVLIPSSPIALLKSNILSAQSKLQLMLEPFLWRKRYASKISDEHAQESVGEFFERHFGKEFVDYLIDPFVAGTSGGDPQSLSMRHAFPEVWNIENKFGSLISGLIQSKLSPKKEKGGGGKPSSNEKTRIRGSFSFQGGMQTLVDTICNQFGKDELKLQCKVLSLSYSHKGIPSSENWVVSSVSKNSIEDQQYDAVIVTAPISNIKELKILKAGVPFSLDFIPEVSYLPLSVMITAFKKTSVTRPLEGFGVLIPSNEQHNGLKTLGTLFSSMMFPDRAFSDMYLYTTFVGGSRNRELAKASTDELEQIVSSDLHQLLGTEGKPTFVNHFYWNNAFPLYGHNYDSVLRAIEKMERDLPGLFYAGNHKDGLSVGRTISSGYKAAELVISYLNST

SEQ ID NO: 22 - DNA, 37009 bp, synthetic construct
  misc_feature 1..37009: note = F420V mutated Beta vulgaris PPO2
  variation 32531: note = n is any nucleotide
  source 1..37009: mol_type = other DNA
tattccatcgaatgtagcaaattgactgtccgttgcaatttcggagtttccactcgtcgcatggtaaatggtaatgctatacgattctcacctctcaggagtctcaactcatcttcaactatcgcaggcatttcccaggaagaacccattaatggccaaagtgtctgagccgggtaaacccagtaagtcaaacattcgaatcacaactcaagcaaatttgtcttgtttgcgttatattttgctcatttcagccttttttgtttttccgacctttgcatactgaatattgtgtgtgtgtgtgtgtggggtttcagcttctgctaaaaggattgctgttgttggtgctggtgttaggtaaattttcgtctcttgcagagtttttgagtcatttgggaattctatgtgaaacttgtaactcccttcagtccaacgaacgcagtacaattttctatcaaatcatggtcctaatttccaattttccatatatattgttggaattatattgggattgtctatcactattaatagtattaggatcaattgtagagaagcacagaaatttttgggatcgaaagaatatctggattgccacattaacagcagatataattcttccaattggtttttggttcttcctaccttgacttgtctggtcaaacattataaactttaacctttaatatccattaaagtaaactataggatttttttgtctaaaacatgcttatataacatgaaatttgtgagaaaccaccttatatatatttttttgcgaaaacaaaccttaaacaaaattattatcgtgagaacaaaccttatgccaatttcgatcattgacccaaggttttggcattgaccgtgtcatgaattttgttgggtttaaaaagtcatgtgtcttgcatacgaaatggtaaatgcgggaaccttgggtcaatgtttggaatccgcataaggtttgttctcccaaaaaatgtttttgttcaaggtttgtttttgcaaaaaaacttatataaggtgctttctcagaaatttcatgttttataaagtagtatttgacaaaaaaccctaaaatatattatagaattattattgactaaattgtgtaaaaatgtactcttctaaaagtacattatagtattttagtggaacatttgcgagaaactactttataaatacgatttttgcgagaaatttcctaataaaaaaatgtgaagtgcaaaactatcttattgataattttctactccctcaaatccaaaatactatgaagtctttcctttctggtttgtcccagattagtttgtacgcttccatctttggtatgatcccacttttattatacttattagttttacgtgagttccttactctatctcttttaacaaaaatactcaactatctctatccaataaaaagttccttactagtcctatcacatctgctttttaataaaataacgtttgataaccacacaacttatatccttaaaatacacgttcaaccaagtgttgagattaatttggacggagggaataaatattttttgaggcatattggtagcagtattcggattccgataggttgactatgtttccaatgttgaccaacacttgccttgcatgtaattctaactttgctcttttttattcttcatttccctcgtattccatatacaatgtttagagacccattccttcctcttctcttctttcccttccttactatgctttgccataatcttcctcaaatgagtgcaaattaatttgtcgttgatgtaggccaactgattgtagcacatcttcatagttcatacctcaacacactcgtaattatattataccctacatgttaaatggctcatgaagctttattttatatcatacttcctccgtttcacaataagtgtaacacttttcttatttggaataatcacaataagtgaaaccaagctccaaatggtaagaaaagttcactcttattacaaatataccaccaaaaagtaagaggggatcacaacttcaatacttcttcactctactttattgtggtcccaactttctctctctaaattccttggtaactccccactttctctatgtttcacttatggtgaaatggaggaagtattttgtagtggtatttagctactaggccttggatgatatacaatcatacaatgtatttatattcacgataatttgctgcccaccttgattaccatgatttccaccaattttatcaatttcagtacttcaccaccccgaatttatattttttatttccaaccttggtatctccatttgtctgagtgcccgatccatttgtatcgcctccagaattgaagaagcttcctgcagctagacaattaggaaggttaaaaaagtttggagatggtggaggatagccataataatcattgttgggaggtggaacttggaaggttattgtagggttgaagtccttgatgaagaagaattgagttcaaatgagaggaaaaaggagcagggaagagggacaataagaaaaaaaagggtaaactaaaatcacgtgtaaggcatgtgcagatcaacatcagaaagcatagtcaacctactggtattagggcactgatacctttttgggtcaaaatttttttacaaggtatttcatgaggtagttttgtccatttttttttttacaaggtatcgtctcattttttttttatcatttagtttctcgcaataagtgtatttcatgaggtagttttttccaaaatttcctcatttattataaaatacctcatcttttccataaataatgcaatgtctagacttttacgctgtttacacatgctcctttgaccatctattgacacacaaggaaaaatagagtagagtcatgcaggatcttgttagatttttctcgatatatactttcaaaagatcaatttttttataattttttttttgaggggattttttttttataattatgtacttatcaaaggtcaaagttgtgcaccgggaagcataaaactctatgtgttgcaatttacatggaaggggaggagtataataagagaaaattatggtaaaaggttcattcctggagatcatgagaaaggaagtagaaagaacaaaaaagaacaatgggagtgcttttcaatgtttgttgtacgtagcatttattcatttgctataatgttttgtgacattgtagtggacttgctgccgcatataagctaaagtcccatggcttgagtgtgacattgtttgaagctgatactagagctggaggaaaactcaaaactgttgcaaaggatggtttgatttgggatgagggggcaaatactatggtaatgtttttgattattgcaggtcttgcactttagcgcacaattaatttctggatttttttttgtactgtggtggttatggtcatcaacatgtctcacccactgtgcttgcagatagagagtgaagcggaggtcacgagtttactcgatgatcttgggcttcgtgagaagcagcagtttgtaagtctttcattatctgaatggcacatactttatttcgaaagattgtaattgccttttctttctagatggcttcatcttcatgttgctttctgattcagtttcgtggctaactttccaagtttgtctgattgctaactctgtcatagccaattgcacaaaacaaaagatacattgcgagagacggtcgtcctgtgctggtaagtttgcttgttttacttttgacctcttttaagatctttcaactctggagcctggaaacatggtgatgcaggaggcaagttctctctattttacatcctttcttctctgtatcttatgacatttgcctcttattctgtgcagataccttcgagtcccattgcacttctcaagagcaatatcctttcagcgcaatctaaggtcgttttatgttaagacatacttgatgctgagagtttattgaattcttaaccttcttcttattttttttttatttttttagcaaaaggtaagtatattgcatttaccaaaaaacagtatgtacaccaccacagcagccatgtcagaatctagaaataccaccgaaaaaatcctacacccaaccagagacagttatattatatcctactcctaagtttctgtacccaatttacatcaatattggtccatttacaagatatttttataattcacagaagcacatcagttttaattagtttaataatgacctctggatgaataaccaactcagaccatatagccttattcctggctttccggaagttgtacgccagagcagcaagcacagcaatgcaaacctgtttcttatacctccttttatgtgtcttagcccatctcttatagctagtgaagatacagtcgtgtgcacaggattgaaccccaatccaactagcgaaagcctcacaacattatgactataaatacatctgaagtataaatgctgcacctttttctcctcttgcctgcacggtatcagaacaaatcccagctttagctaacaattccctggttttcagtttattcaatgccatcatgcaagcaatgaaagaatgttttggaacattcagtttgttccaaacacagtgagagcaagggacctttcctgcagttccacttagccacttatatccctgactaatagtatgactctttgcaccgtaaattgatttcaacttaactttttcataagcagtgaattgtgtgttgttagagtgtctagctgtctaggagattgggagaaaaggagggaccaaggagatagaaacacacctttgtgtttctttgtgtatttactttttagggtgggtcacgttttctgagaaatttgggaaaaggaagaaatagtaacacactttcccatttgtataacctgtatactggagctccaatataatttgcatttttttttgagctgcaagaatatgttgacaaacagttattgcttcttcctcagctacaacttatgttggagccattcctttggagaaaacgctatgcttctaagatttctgatgagcatgctcaggaaaggtaatgtcaagacatgtgttacctcgccttaattttcgttccaggaggtgagcatgcatttagaactaaaaggcacaaagactgttggtggtcttgcctgttcaaatataatggagaggagttttcgctacatttaccctctcttgaagtggggttgaaatatagcatcaagttgaatgcttgattaagtttaaaggacttgtgtaactctttttctgtttactgtgattacatgacctggttgattaacataatggtctgtttatctgtagtgtgggtgagttttttgagcgacattttgggaaagaggtaatggtttaccatagtatttctgctttagtggtaaattgtaatgttgctgataattatacttcgctgcagtttgttgattatctaattgatccttttgtcgcgggtacaagtggaggagatcctcagtctctttctgtaagtgaacattttgtgcttcactcccaattttttggaggctggaaatagattcttttccagttgttctgtcaaaaatagatgtagctttattttgaatttgaagttcccaattgttcattttgactattactgattattgctaagagtggcattatgctattatgctcctaaaagaaaggtgaattttgacctacatatagtataatgtatcaatattggtttaattgtttgttcttttgttccttttggtgctcatcttgcgccttgttctcatcgctcgttttttcatgttgcacttgatttaaatttgctcagcttaacttgtctttttgaatttatattacttattgctatattttactaatttcgttgaaactaattttttgctgaacttttcgttttgttgaaatcatttttctgaattaacttgattttcctgaatagaattgaattttggtgatcttaccttttctgcagccttttatttctttcttgtcctttttccaatctcatttttttatatttccattgtgttgacatcttatcattaactgtgcagatgcgtcatgcatttccagaagtatggaatattgagaacaagtatggaccataagacgtttattttaatcgacatgtatgtttcttagtttatacatatattaattctgtggtaaaaaaaccgaacaagaatatctttttttttttctatcatcaaaaagggtgaatatatgtagaggaaaaagatttgaatcaagatattagcctaaagcaataataatgttagtaatagctttaataacaaattcaaaacgtacattaatgaaccgagaggccggaaaatagttaaagtgaccactaagagaagcgaaggattcatgatgggttttcaacccagtagggcaaatttgttcaatgttctttacaaatcaagcttattaccttgtgggtgtttttgctagagatgaatgatagaattttccctagttggaagtcttttttggttactttatgggagctagtgatgtaatttgtttcgccttatggcatttcctaacatgtgcttttgtgatgtattgaagctttttttttgccttaatttatgctggattttaattttgttctttgtttcatttttcttgcttttgaaaaaaatatatagatatgtatatattaggattggtcgaggattttgagggaagggaaagacctaagaaaacttggatgagggtgattgatagtgatatgagtctatttgggatcgaagaaaatattcctttggataaggtgtagtggagggttgagggagcaaatttatgcagattagcttgacttaaagtttttctttttgattatttttcatttacttgtgttttgcaaacatttactcatgaatgatgtaaacttcttcaaccaaatctctggaaaaaaataatctacatggaaaaaacattattaatgttaacttgacagagatcccatccttgtgaagcagctagcaattaggcatctaacaattgacattttaatggacaggatagaatgtctcttgatagtcaataccctctgtttcattgtatcccatagctactaatctagtttgtatctttccaaagaaccattattttgaagtttcaccttgaacacccattttgaaccaatatgtttcttgcccttggggagaggggctaattgccatgttttgatgcggatgcaaagacacttgttctacctgagcctattgacttgatcatggatactctagggtttgaactcaagggaaagaatcaagtcttggcatgtgtggtgacatggcgtggggatggagtaaagaagagtcatagttctgttaggatatgttcttgcttgctacatagaatcgtagttctgttaggattgctatgatattatatctagtagatagattttatagttaattaggataaacatgtgatgatcatgttataataggcatgtgattagaggataggattagcttaattcttatcttgttgttagtttaattcttatcctagttttatgtttatcttagtcgaagttgtagccatataaagggcgttccattcattaataatacttagttttgctttgtgttttaaacatacttcttgattattgtttgcttgtgagctaactaatcaaaccattaaagacttttcaggagttttagtgctaaacatcttaatttcaggagtgattttaagagcgtttagtgatcttgaatcaagaaatatccttgttcttgttcgactaatatcagtggttttgttcgagttcttggagttaatctcttcaagattcttattcaacttgattgttgagcttattggtttagtaatcatatcaagtggtatcagttttccagggaggagaggatagataggattctctttgatcaacaaagatccaagggctatcaacaaggttcaaacattgctgcttgttcaagacttgatctttttctaccaagatgcattctttacgtcacaaggtagtaataacaagattaagagtggtttttacatccaagaatcaatctttcacgtccaagatttcatctttcacgtctaagattcattctttaagatcaagaaagttataacaagcatagaagaacacataaccatggagtccgagatggacaagcttgccaaagctatgcaagcacttgcaaagtcgcaaactgaatcacagagtcgactcaatgagaatactaccacaatcaatgggattggtagtaacatgaataggttggaggcacgcatggatgccattgcaaccatcatacaaaagaagcttgatcggaatagtgccaacttcataggtgccaattcagaggaagagttggcagaacgtgaagaaagatcatccaagactacatacaatgatgatcgtggcttaaagttggatgactataatggagatagcaatcgagaagacttgttacagtggattcgacaacttgagaaggtatgtgattatagaggctttgatgacaagaaaagattcaggattgcctccataagactcacgaaatatgctggaatttggcttgaaagcttcaaggcacaacgagccaagaaaggtaaagaaaagttgtgtagttggacaaagttgaaagttcaagcttaaagagaagttcttgcctagtgactatgaacaaaaatagttcataagactctctactataagccaagacacgcttagtgtacatgagtacaccatggaatttgacaagctagggcttatatttgacatagaggagaaagaacaatggaagattgcaagatacatcaaaggcttgaaccgccacattgccaagaaggtggaagtatccacttatcacacctttgaggatgtgacaaagttggctaagaagtttgaagaacatgagaaggaagagaagcctaagagttcttacacgcctaagtatgatactaatgctaaggccaaggctagcttcctactcaaagtggtatgaaggacctaagaggctaagaacctcaccccacctaaagaagacacaagagttgagaagcctaaagtcgtcgttccaaaggagaaatttgaagagatgagaaagtgcttcaagtgtcaaggaaggagacacatagcaagcaattgtcctaacaaaagagtcctcaccatgagacaatacctagctttgcaagaagaggaggatgtctattagttcgtccctgatgaagagcaaacttaggggaagaagaggaggaggatgcttttgctgaggatgatgcaaggctagtaggggtcaagaggcgcaccttacatgtcgaccatacacctagcatggagcaaatggaaaaatcttttccacactagatgcaaggtaggtgactatatatgtaatggtataatagatagtggttcttgcactaatgttattgtatctgaggtagtgtcaaagctaaacttagctacaagggcacaccctaagccatacaagttgagtttgctagatgatagcactggcatgagagtaaagaaacaagctttgatttcattctctataggggttataaggatgagttatggggtgatgtattgcctatgagtgcatgtcatctcttgcttggaagaccattgcagtttgataaaaaggtcatccatgagggggactctaatgtgtactctgtgttggttggttctaagagggtatgtttgcatcccttagctcctcattcagtggcgccaaagcaaccacctaagacaccaagttactttctatcttcaagggagttcgaacaagaggtggaggaagaaggttgtgcttatgccttgattgtaagacatgctgccacaagtgtcaagactactagcaatgagaagctcgaagccttgatgaaagagtttgaggatgtctttctagaggaactacgacccttgagaggcatagaacatgctgtagaccttgtacctggcgcccctttgcctaacaagcctgcttataagtgtgatccagtggcatctagggaattgcaacgccaaattgaggacctaattgaaaagggctatttaagggagatcatgagtccatgtgttgtgccagctttactagttcctaagaaagatgacacatggaggatgtgcatagatagtagagcagtgaacaacattacagtcaagtaaaggtttcctatgcctagattggaagatatgttggataagttacatggggcatcaatcttttctaagattgatcttcgaagtggctaccaccaaatgaggatcagagaaggtgatgagtggaaaacaacattcaagaccaagcagggattgtatgagtggatggtgatgccatttgccttatgcaatgcgccaagctctttcatgagcttgatgaatgaggtacttcgtccgttccttaacaagtttgtggttgtttacatagatgatatacatatctatagccaaaatgtggaggaacacttgttgaacttgcgtagcttattcatgaagcttagagagcaccaactctatggtaagattgatggcgacgaggttgacgggggattatggcggcagtgaatcaccctctttgccggtcactgaaatacaacctgaggtatctttaaattctgtaattggattgactaacccaaaaactatgaaattgctgggaaaaattgctggatgtgaagttgtggtgatgattgaccctggggcaacccataattttttatcactagctactgttgagaaattagctattcctgtgtcggaatcggaaggatttggggtttctctaggggatggacaggcggtgaggggtagtggaatttgtagaggggtgttattgagtttaaatggtggagttgaagtggaaacagattttcagcctctgggtcttggtaattcggacgtgattttgggtgtacagtggctggagacgttggggacagtggagagcaattggaaaacacaaacaatggggtttgaaatcgagggtgtcaagttcactttgaaggtgacccatcactggcgaggtctcgaatctcactcaaagccatgatacgtaccttatgtaaagagggtggaggtttgtggcttgagttgaaccagattgagcattatcaggagaaaacaccgcattcatcagccttacctgaaattccagttttcttacagagagtccttacccaatttcagtctgtgtttgctacaccagaaggcttaccaccgataagagaacatgaacatgcaatagttcttagagaagggtgtaatccggtaggggtaataccgtaccgttatccacagttccaaaaagatgagatagagcgcctcatcaaagaaatgttggcttccggaatcatcaatccttccacgagccctttctcgagcccggtgatattagtgaagaagaaagatgggtcgtggcggttttgtgtagactatcgggccctcaataaagaaacggtccccgataagtatcccattcccgtgattgatgaattgttggatgagcttcatggggcaacacttttttcaaaactcgacttaagggccgggtatcaccagatccgggttaaggccgaagacactctcaaaacagcttttcgcactcatgaggggcattacgagtttttagtaatgccatttgggttgacaaacgcgccggcaacgtttcaatcccttatgaacgaggtcttcaaaccattcttgcgcaagtttgtcttggtatttttcgacgatatattggtctacagtagttctgccaggaacatgaggagcatttgaccttggtgttgcacaccctagcagctcataaattgtttgtgaatcagaagaaatgtgattttggcaggtcggaagtagcatatatggggcatatcatctctggtcaaggggtggctgtggatatggagaaggttcaagcgatggtggaatggccccttcctaaaaacctccgggaattacggggatttttgggccttacagggtactaccgcaaattcgtacttcactatgctcatatagccaagcctttaactgatcaactcaagagagatgcgtttgggtggtctgaggcagcaactcaagcctttgaaaagctcaagaaggcgatgatcacatcccctgttttggcaatgccggacttccaagagttgtttgtggttgagaccgacgcatccgggtatggtctgggggcagtgttaatgcaaaacaaccgacccattgccttttacagtaagttgttaggtgcccgggctcaattaaagtcgatctacgaaatggagttgatggccatctgcatggcagttcagaattggagatattatctgctgggtcgacatttcctcattcgtacagaccaacagagtttacgtcatctcactcagcagcgagaagtaagtactgccttccaacgttggatgagtaaacttatggggttcgattttgaaatacagtttaagccggggtgtgccaaccgggtagctgatgcattatcccgcaagacagtgggagaggttgaattgggtgcgctgatattaactcatggggtggactggaccgacttggagcgtgaaattgaaggcgatcctctgttgtgcaaaattaaacaagacttccacgggggtgctattactcctgtgcacttttctttggtggacaacaagctgttgttcaagggtcgatacgtgattcccagctcttcggtttttattcctaccttgctgcgagaatatcacgattctcccattggagggcattcgggggacctcaaaacatatctcaggatggctgccgactggtattggaggggcatgcgcaaggatgtggcgcggtatgtgcaacattgtagcgtgtgtcaacaacaaaaaatgtctcaacagatgccagggggggtactacaaccactccccataccttcctcggtttgggatgacttgtcaatggacttcgtggaaggcttgccatcttccaagggggtaaacaccatcctcgtggtggtcgatcgtttgtctaagtacgcccacttcctcccactacgtcatccatttactgctgtgtcggtggcaaatgtgtttgtcaaagaggtggttcgtttgcatgggtttccttcctccattgtttcagatcgggatcgaatttttatgagtgtgttttggcgggaattatttcgtttacatgacaccacactcaaacgaagtaccgcgtatcatcctcaaacggatggtcagtccgaaatcgtcaatcgagctctggagacttatttgcgttgctttgtgggggaatacccgcgctcttgggctcagtggcttgggccgaattttcatataatacttctcctcatctctctaccaaaatgaccccgtcaaggtcctttatggtagagaccctcctactgtgatacgggttaatcggggagcctcacctgttgaaagcttggaaaacatgctccaagagcgagacgcagtattagatgccttgcagattaatctgattaaagctcaacagaaaatgaagagtagtgctgatgctacaagaagagaggtgcattttaaggtgggagatcgagtgtacttaaaattacagccttaccgtcagaaatctttggcttaacgcccttatgagaagttagccgcccgtttctacggaccatttactattttacagaagattgggcaagctgcatacaagttacaacttcctgtttctagcaaggtgcatccggtgtttcatgtctcccaactgaaacaggccgttggttccattcccgtttcagccactattccagagcaattgtcttctgacttggagttagaggtggaacctgatgaactcctcgatgttcgtagtgtttctagaggccagcacacttacttggaagctctcattcagtggcagggattaccatcattcgaagctacctgggaagatgtggctgctttccatcaccattttccatccttccaccttgaggacaaggtgaaactttgggggggtggtaatgtgatgcaccaaactaccactccactactcacctattagaggcgtaagaaaaagggggtaaatcaggaatagtttacaaattctgttgaaaggaatattttgtaattatgatgtcagaggttgttagcaaaaaggcagtagagtaacaataaaaaggggaagggaggagagaagaaggtattgagatttttgtaaggaacttggcccttgggagagttgggagcctctcgaaagctcaccattatcttgtgaatattttccttcctggttatatacaagaaccttcctctgtcaatttcttttctctctaatcttatttcttattctgttttctggttgccattgtttgaagttgcttgttgtgcttgagtaaatacgtgaagtggtgaaacccatctgaattcatcacatctattccaagtggtataatacaagcttgtaatccaaatctaatgagaaatctaagttatgaagaatttcaaaagaactaagtacccttgttttggatgcccaaggatttacttgccgctcaagttaatgctcaacgtgcaagatacaacctctttagtatcccaaggtagtttccataagaattaattgagctcaaatcaagaacaatatttttatgtattaatgtgaacacttcctgaattatattagatatatggtctgaaggttggaagaaagattagcttttaattttaagtttgagatagtttttagaatcgaggaaagattagctcttaacttgtaaactaaggattgctttataagtaaaacattagttatggaactcttaaaattggttttgaacatttctagttaaaaatcccatgtaattctcccaaactagcttaaaatctcacatttcacaagctaaggagagacaaatggcgttctcttgtgaaacaatctaaaattttcattaggctactgttttcaagtatttatatgttagaagtgccgcatataggtacataaaataagtttacaaacacaagtaggaataaggaaaactaaaagagaaacttcagccatacaaaaccggctgaaatcagctactactttctactttctagcttcaaaatctgattgcaagtctcctttaagccaatcaccaatgaaaacctttcctccacatgaagtgtgctcaaatcaagagaagaaacccatcattcgcctatagctacctgggtcagatgaagatacggcaaaaaaaacgctggaaatcagtgaaccaaaataagcaccaattggatgctttctgtccttgctacattttcttctcataggactacttcaagccatacatgaataagcagttagatccagctcctagcatccatttgatcgtacaaatgagctccaaaaagataagtaaaaccaagcagccaaaacctaattaatactaatgatgaattagttgaatagctaatgacgatgaagcaacactttagtaggaatagtgttaattatgatcaatgctacttaatcttctgattaatttttggaaaaatgtcatatctaccttctgtatacacttattcataactatatcgtattattattatttttaaataactaccttttaagtaccaaaacctaagaaatcaggcacttgatggattccatccaaagatccatttggcggggcccactaactgacttttgattttttgcctttcctcttttggttaatctcaatggttcatcaataacaactcaatcttctccccatttcatcaaatcatccctaaatcagaactttttcaaattcacccaaatgaggttatggaaacctctaccaagtttattcgaccacttttagtctagctcaaagttttacacttgcttcaaaaactaagatttattaactttagaaattaggtttttatttttattttttatttaactttgtaacaatcttaaataactcaggtgctttctagagtttggctttaattgtttttcccttggttatgtgaaagaagtatgactactttctccaagactaaagtagagagcaaaaaatgcaattctggaatttcttgcaaaagaaaaggaacgagttaatgataatgaaaaacaaagaaaatgatgagaagagaggagctgaatcaatcatgatcatgtattttaaagttttttttgctattgaagtgacttaagaagaggaaagaggatgagtgaagacaaacaaaagaaaggataaatagagggaaatcttgggcttagaaaggtgaaaaggtaagaagatgagttagtgggccccaacaaatgtatctttggatataatccgtcatgccactgtttggggcttgcttaagtccatacattacttcactaattttacaaaatttattttcttgaccaagaactgaaaaaaccttcagtggtgatctattaggttttggaagttaaaaggtagttatttaaatgtttttaatataaaaggtagttatttagatatttttaatataaaaggtagttatgtgaataaaagtgtatataaaatgtaattttttgacatttttgccttagtttttcttgctaattcaccttttcaacttgaccaagttgctatgaggagaaaacgagcaattattaagcaaatcgcaacactagcattaatccatggcccatgaaactctccataattagagattggattagcacttagtagaacttcttgctcctgctccaggtttccattacttctttatctaagtgcatcaaaaggttgttgggttatgaaaggtggtggttgtgtatagtcattgtcaaaatgttgttaatgcactctatttagaggatgagggattgaatagttttcacctcgtgacctttcattcctttttaaaaaaattgataatgtgtattggtcctatgactgtatgaatggtaataagctatctcatgagctgttactatcttcctcagagtctaggtagaagggtttgggctgataattttctactatgtgcaattagtttgttggatttggatatgctagttgatataggtcctttcccttgggccttctcttaatataggcctacagtgtgattgaagataaatcttctggagaatataagaacaatgagatggattggttagaggttgatttgttcttttggtgtaagactatttcgggttctctattggttatgttcagacgccagaatatgtgttggtgattgttttccatgaacatactttatccgcagagacatttttcttttttcttcctataagattatatttgtttcctctcttggtgctcatctcagtgtctctactttacgttaaactgttgacattacttgacaatgcgtatatttgtcgcatggtgctcttccctcactccacgtcgaccccatacatcaaaaaatgccattaaagaatattcgaactcacaaccttgtgttgaaagaatggaatccctaccaatgactcattaattcattttctctttaagaaataaatgatttcctcacaaacttttaggctttaagagcccaaaagataaaaacataaaataagatagacatcaacgtcaagattagccttaaatgcacaaagcacatgtcaaatgattgataactactcacgagttgcaactctttgggcgttgcctaatattaattggatctcttttaaaaattgttggtggttatggttggtggagaggaccatgtaacttttagctggtcacaactggtaatgattgtcacttttactgcccataaaaaaatttaaactgttgaatatgtttctggcagtggatctgacaaatcctttacaagttggcgtccattttgttttgccatgtgactcaattataatacgtgagttttattatccaccaggtttggctcactaatttccggattaattcaatctaaactgtctccaaagaaggaaaagggtggaggaggaaagccttcttctaatgaaaagacacgcatacgtggttcgttttctttccagggtggaatgcaggtattagcatgtagctttcattctgttaacatttgtggttcttccagacatacatccaatgctttttttttttcttgctataaccataaacattcttgtcatgaacattctttaatactgttgctgagcttagtgtattcgttcattcatgtaatttcctctcttgaggttaaaatggcatacagccttacaacctatatccataatgctccttagagtagaatccctaggttataacatagtaccacttatcaaaataaacatggcacacactgcaggacaagaagtaaatccacctagagaactgagcacctagtagtaaaagcagcgatacattactaataacagtagcagggccataagagtagtaaatgggcctcatttcaacactccccccgtaatggtgagagagaagaagcagtctgaactcccagcttggagagcaaaatagagtgttgctgaacagggagaaccttagtgaaaacatctggcacttgatcttgagatggaacataggtaggctgaataaccccttcttcatttgtattgtccctcaggaaatgacaatctatgtctacatgcttggttttctcatgatgaactagatatgctgctatggcaagagcagcttggttatcacagtagataggagtagcactggactttttaatgcgaagatctttgaggagttgtttgatccacatcacctcacacacagcaagagccatggatctgtactctgcactgaccacaagaaattgcctctttgactttcaagatacggggggagtcaccaaggagcacacaaaaccagatgtagaatttacaacacccatcccattcactatcacaaaatgctgttagttgagcactagacttgttcgccatgagaattcaccctgttggcagcttgaagatgcacattagtggggcagtgcataaatttgcttaaatcatgtatagtgaaggcaatatcaggcattgccttgtaatagtgagataaatgagcttccccatcaatttttgatacacatcaggttgttgaagaggatcaccattgtcagcatagagcttgacatgtgagtccatacgaagcctcaatcgtctgcaatttataaaaccatattcatcaacaagacccatcacatacttctttagagataaaaacgatacttcactacactgatccacttcaatcctcaaaaaatatcttaggccacccatatctttcatgtgaaattggccagcgaagaaactctttgcttcctcaatagttgctaaactattgccagcaagaatgaggtcgtccacatacaccaatatagcactgaaacagtgagagttttgcttgaagaatagagagtagtcacacttggattaagtgaatacattttgctttaaagcagtgttagcttggcaaaccattgcctcaaagcctacttcaagccataaagtgacttaagcagcttgcacaccttagttcatttggtgtcacttctgccatcagtacttagctccccctctccttgaactttgatcctgttacatgtttcactatatcctggtgatagcttcatgtatacactatcctacaattcaccatgcaaaaaagcatttttaacatccatttgtttgcaagaaccaaccctctaaggatgcaacaacaagcatgtggtcatctttgctacaggggtaaaagtctgctcataatctattccatatctctgtctgtcacccatgattacaagccttggcttatgcctattatttgtgccatcagtgctgtattttgttctgatccatccatgtgagggatggctcatttctacaaaatcctagttccgttaggatttgtgttgttttcctaattctagtaggaataggactcctaaaatcctaatcctcctagttctgttaggagtttaaaagttttagtttgattgtaattctagttgtgttagaaatccaaatcctagattcatgtcacgtatggttagaacatggctagtaggataatttgtcttgtgatgtccatagccttggcatttgtggcacctaactttcaatagcttgtcttctgtctccttttctttctccttctttgaggaatcaacgtttttagagctatctaaaccactagcatcaatattaggtttaaaagtgctaaaagatttcgaatagttcttacttgcatacaatttctttttctagtttatgtagcgtcaccagggaacaaaaactcggccgttccgttctggaacggccgctttgtaacggatttcagagaggccgttccgttaaataccgttctagaacggtgatttggaattcacaccaaactcggcgcgatagcgttacgtaacggtgtaacggcgttccagaaccgttacaatcacataacgtccgttatttgaagaagaccagttcttttggtggaggaagaagaagagccaacgcaagatctatagatctgagttaaaatttgaaaataaaacatgtttttttatttaaattaaagcttacagaggatgtagaactcaaattcgagtaaacccctcctttaatttcattaggttactgcaaatcgaaccctaaattgcaaaccctaatttcgaaaaaaccctaatatgcattgggatgcaacgctgcttctccggtcatggcagagaaggtcgacgagtcatcttcggctgcttttagcactgtagctgccggtggttggcttgtttgcaggttagtgcttgctggttttctttctctcataccgatcatcttcttcttttctctcttctctttttcttttttattgtgtgactgccagtcacgtgataattgcaactcataaagtatctctttctctctcttcttttcatccctttttatttttctttcccttttagtttttattccctcacgtggaatcacctaattttcatccttttttatttttttagttacactcttacacagaagtatgttcaaatatcattatagtacctcaaatattgtatttataagagttttggacataatatgatatagaaagtaaaatagaagaaaaataaagtttaaatgtcacttgtgtgatttttttaaaaaaattcacgccgcgacggccgcgaaacgttctatttcccgttacaagccgttcccgcgataacgcgaccgttcccgcgaacgcgaccgcgaccgcgttttttttccttgagcgtcacatcttgcaagcttcttcaaaggtgagttatgtgtacaactccaatttctctccaatcccctccgtcctcatttaggcctccaaggaagctacttaaacattgatcttcaagttcatcaattttccaaagaatggataacttctcgaactcctttatgtaatcttcaacggacatattcccttgtttaagagtagaccattccatgtacaagctttgtttgtagttagaaggaacaaaacgtcctcttaacaactttttaagcttatcccaagtagagattttgggtttattagctttcacacgctgcctctttactccatccaaccaaatagatgcatatttggttaccttaagcacggccaccttgtatttcttttcttttggtgtctcttaatcccaagtagagcttttgcgtgtgaaagctaataaacacaaaatctctacttgggataatcttcttcttgtttccgaaacaactaattcttatggtagttaggaaagcaagaatggtttctaattcaatagggaatatattaattattattagtttaagttaaatagtgcacgaatctaaatagattattcgtctcaaaatctcacttaagtatagatttgtttggacatctgagggaagaagaagagagcgagataaaggagaattatcactcaatgaatccatatcccgagttttcccatttacttctttgaaagcaatatagttcacgaggtcttattatcagtctatggacataagagtaataatttaagggcaaaaactatgactttatgggtttaaactgatacatgttctgttaaactgatagatgttctgtgttaaaccgatactcatatattcctggttaaactgatagatatatgatttaaattgatacccgtctcagtcatgtcttggattgagacggtctgacacaagactttttgtgtattatatatctgattagaataaatttatcctgtttactaattattttatcttctccagacacttgttgacacaatatgcaatcagtttggtaaagatgaactcaaactacagtgcaaggtcctttcattgtcctacagtcataaggggatcccttcttcagaaaattgggtcgtgtcttctgtgtcaaaaaattccattgaagatcaacaatatgatgctgtcatcgttaccgtgagttttactttgcttactgctattgcaccaatctttcttcttttgacacactgataatggcaatgctgttgtggtttgaagccatgttatggggttttagggatatttatggagtctgatctaatatgttattggataaaattcagatctgtaacgtgactcaatgagattgaaaaaaattgaatcaagataatggattggaaaattaggagctaacctagggtctataagcgatccacttggagtctcataccaagcaggtattcgacattttaggtttatattgctgctatggctcatatgggagcctacatagggtctggtgcttattcctttttcttttgtctagttttggggctgcacatttctgttgtgttttgatatggatagccatcacctgcaattgcatggaggctgaactaagttctataggggagcaaacagtatctgttggaaatttattttcatattgtgtttttaaatgctataatccaaaatttgttgttcccctaaaatgcctaaaatacccttatgtaactgctccatctgtcccttaatagacttcccatttctccaatgcatgtttgccaatacacattttgtattgttaatatcaaaaattacatattagtaaaaattataaaagtttgattttcctaatgtacgcaatgagacgaatcaaacaagacgccatatgactatgttttttcttatacttcctatgttttttaataagtgacatgttttccttttagggaaatgtcacaataagtgacacatagctcaaagtagtaaaaatacttctcatttattacatctttgccattatttaattgtttcacctacctactttatccaatactcaaatttgattggttgaacaattggtcccaactttctctagactccttggtattccctttcccccactttctctctgtgtcacttattaaaaaatggaggacgtatattggaaaaaaattggaaggttttcttcacttatgaatagtggtaaaattagagatgggaaggctattttgggatggatggagtaatatttaaatttttaaaataatgtcattgttttagtgatgaaataaaattcaaggctattttttctagtaattatgttatctgtacatcaccacacgtatcgcgtgcatataagactagtttgatgatattccaacactgttcgaaggaagtcaggcatggaaccatgtttgcttccatatgggaaatattttgcttactctccttcaaacatctacctcattatcccagaatgattgatcgaatctaatacaaatatacaattgatcatatgccaccagggaattacatcaaattaaatttttatagaaggggaatcagtcatagcctcatagggaacgaataagtgatactcgccagtttctttcctggttacttttcctcttctcactagccatcctttatgtatgggtatgctgcatcattcctgccactggttgggactcccgtttgaactatggggggatgggaaagctaagccatcatcttcaaattgagtttcttgagaatgtaagacaccatctgtaagatgaatatagtgcactctatagtcaatgtcatgatctttatgggtttatctgctgaaataactgtgatatacccagctctccatttacaaagttttcctacatattaaactcttgcccgcaattctagaacttcattgtagaacttttcctacataagcatcatttgtcttttctgtagtaaaagttagaaagagctttattttagaacattcgtttttagttttctttgttgttgattactccgccacttttaatacttttatgattcaagtatttgacaaaatcatgtaatttaggtcctctgctgcatgcagtctataccctctctctctctctctctctctctctctctgtggttgtgtcttacttgttgagttactaactccagccattacataaagtaggctggcattatgatgagcaaattactcaagaccacatgttagctcctttttcttttctccttattctgaaaggcaaatataggtccatcttggtgcttctcatgtcataagtaagctgaccccctccttttccagggaataggacaataatccaaaagtgagggttttacatgttgggatttgtgaagtttcttattttacttaatagccgagtcagtgttacaatacatagtaccgtgttacaaaatagtatgtaacaccaagcatgtttatgtgcaaaattgtgcaagactttgttgctggcacgccaagggctgttttaatgtagtttacttattcttttaggtttttcagatgacaatcataaagggaattaggagtgtttttattgtagtcaatccctattgtgctacaacgataaaagaaaaaagcacaagactagaaggagaagtaatgtctaggaaagactcctcacctggggttgctagtcacctacacatcttagaaggcatcaaaccaaagcttattcccctcgactgttttcgggagaaaagaagacaaaattgtttctaacttatactttaccagtttcactacagcatcagaaagaagcaaaatatgctcccacaacacggcgaacctagctttccagatgtgataaaccagaccagcaaaatgattattttcactagagctttgagtctattttttcggtttttccccttcttcctggtaatgtcacgccaccaagccatcatctcaattttttgagatttgacgtaatcgctcaaatagctgagtaagacacttcttgctctaaatactaataaaaaagaggtgaatgtgggtctcagccatgttactcaaatcggataaagtgtctactcttattagggtttttgggtgttggactcatccatttttttttgtaaaatgtcaagattttggtttgaaatgagagattcaagtgtcgtgacatgagtcggcacgcaacacttaaacgtgtcgaagtaacagagggtctcagacaatcaactttaatcaatcacgaaccccaaaatttatgcaacctttgctcatattcagtctctgtaaagcactcaactgcagcacacccacccattcgcttcacctacagcaggagggcacccaagtaattgctatgatgagcgaattattctgttttgccttgctggaatattgctgttagatttgctgactcactggcagttaattatagtcagagaatgagaaatatcctgtagagagagaaagggtatcttttgtatttagctctataaatagctaaggaagggaagggcattgagagtttatgatattataataggagagatttagcctctcgaatgctgataggagcgtagctcttgttggattatcaatactactctgtttgctctatctatttctactcaggttccttcttgtacagtggatccctgattggatttacttcatcaaccagcagataaaattatttgtaggcacattgaaaccattccaaacctaatgaggccaaagtttatcacaaagaatataggagccaaatgtaggcaacagataagagtataattgccagaagttgaagactccaggtattgttcagaaaccttaatgcatatcatcattctgacactagattttccccggagccaactaacaaaaatgaattaaagagattaaggctatgtttagttcacctgaaattttctgatctgaacttatctgatctgatctgaacttattttttctgatctgatctgatctgatctgaaccaatctgattacaagatcttatcttttagatttttctcaatatataagaaaaaatatagtcatgtggggtcttgtttgattcgtctcaatgagtactttattaatattcaattattataatttttactaatatgtaatgaaagatataatgatttttaaatataagcatgatctgaactgatctgatgtgaacttattttttctgatctgatctgatctgattagatctgaaataagcaaaaataaggtgaactgaacatagcctaagcaacaattgagggaaaataagatcattatggctaagataagataaatatgtaatgataaaatcagagtaattatatcagttacactctcaacattcgtcagattgaggtttcctcccaaaatgccaacccacttttctgtattttcacgtccttctctctacccttctaggtatatattacatcagctgtaaaatttttgaaccaactagtagaatactgatctaccctcaactgcctcactttctcattttttctgggcctttttctctctagcacaagtccacataagtgatgcatagcagaaatataattccactagtcatcctcaatattgatataacaaacacatcacccacatattatcatttttaatcgctgcatgcgaggcatacttacccaccaatcaggatatgcataacagcgttcctaattccaaaaccaccatatatcttgggtttgcaactctcatccctagcaacaaggggactttctgaaaaagtggcagattccgcccacaagtagtttgtacggacacctttattatattattaatatcatatttcggcaacacaaattaccagcccagtaaaacatgaattgacatgagactaacaaggggcccaatctaatatcgtacgtctgtactaagcaatgtataaaaaaaagctcaaggtgcattgatgcaatagggatcctaatgtgcataggtgcgcctcattgaagtgaggcaccactaaggataaataaaaaagattgatgtaaaattaaattgtgcaccttgggtgcgcctcgatgaactttttttgtgtgcctaagtgtacctcaagtacgcctcattgatatcgcctcgcctggcagaaaacgagcttgaccccaatcgccttgctccccaccgcctaggcgtgcctcagtcacactttttaaatacattggtattaagtactcagaatggcaaaaagaaactttgggcattaattagacatttcactttttgtgcaactatttgtgacttcagagattgatatgttttctacattacagacttttgtgatggctgcatggtctccactgtcaaagaacattagtttaagtagaagaaatattgctctattaccttcctccctctacaaacaaaatcctaaaatgtggttatgtagtgccaattcaaacttgtagatgcatgactaatgctttcattatgctgtgggtttttatactatgattcatgtccaattacataacaattagctggagtcaggatatgtcacggaaattttaagcctggcaggatgattgtttatattttctctttttcggtgtttaagtcaaagtaaacttctaggctgctcttttataggctagttgggctgttggggagatctacacattaagtgtgaagaaatcttgtctaactccagtttggttgagaactgtaagctgtcataacatttgttgcatgatgaggccttgtgggattatcatgttagctgtaaactctaaacttacttgaaatctagtgttgtgtctccttatttctgtagtcaaaattgaaccttctgtacgtttttgatacctgcgactagaatgatggaattctgaattactgatactattacaaccatctgctaagaacgaagatgactcttagctaatttctcagcagatttagagaaattaagaagaattactaatgaatatttaaagagaaaactaccaagatatgattgtattgatgaaaaacaccaattacaacctaaccaacattcgagaggttggagctctcccaagtaaccatttctctcactaaacttatcaattttcaagatgccttttccattctcagttcctctatatttatactactccccttagcaaactacccaacttattccccaagtaaactaaagagataatatctaaaatacccttccccctacaataatattagttcttagcattaccggccccctaaacttccaccttgtcctcaaggtgggtcgtaatcatcactaaattctgggcctctactcgtatattcagtgtcttgcagcccttcaggccccaagcctaggttatgcagctcgtgttgcggctcctcctcatatagttctctggctggagtgagtgcctcaactataatgaaaaagtcctggaggtggggaaggaaggagtgtctgaaatggtgtggtgtgctgctggtgttatgggcttgtgcctgaaagttttgggtttaaagagatggagtggagaagagtggagaagtgactggagacgtaaaagaaggaatcataatttttgtaagtggtgggttgaaaaagttggtgggaagaattgtttttataaaatgtagtgtaatggtcgaaaaatgggtggagtaagtatggtttttggctggggatgtggtactgggttgaaaataaataggtctgagcttacttgtaaaattggcctcaacatgagcaggcccaatatcttgagccaattccccaaaagctggcaatagagcactcttaattgcattgttgtgggccatcgggctccaaacatatattcggaggagccggacttctttggtgatgtcattagcttggcccattgcacactttcccttaacagcctcaagatcttttcccacttttgtaccccaaccacgtggcttcaccatcctttctttcttgcttttgtcacttttttggcaatatacgagtttgtccttactaccctcatcttctaatgttggcttcctcaccaagcttaatttctggaattttgtccaccaaatcccaccacccatcgtcaacaccatacctatctacaccggccaagaagcctggtcctccacccgaattttcgccacagacaaagcctgaacaaccgtcagttctctcaccggagaagttcacaggtccaccacctgacccactagttgctgatccacccttcacaaatctccctcctctggctgccacaagtagtggttcctccgtaatactcatatttctcgtccaagagccctggaccaccaccggacccacttccaccggcaccaacttgttcaaatgatacttctctttcttttccaaacagcctacttggactggaaaaaccactgcgattgtagcctccgccagatctgtagcctagtgcacctaacgtgcttccaactgcaacccaatagggatggaaatggatgggattcggggagggtggagcatcacccgcatccgtcacccgcatccattcgctccacccgctccacccgcatccatccatccgtcacccacgggtgaaacgggtgggtcggtgataaacgggtggaaccatttagggggtgtttggtatcatgtttttttacaaaagaaacagaatcaagtaacaaaatccgtttctacttgtttggttctatgttgctcagactcgagtacccatgtccgacacgggtacgtgtccaagtgtccaactcagctattttctagaattttttatattttttaacccaaaacaaagtgtccaagtgtcccacccatgtccgactcccgaggatccgacacgggtacttgaggtgaaatgaagagtccgagcaacggaggtttggttagtgtgtaaagtaacaattaccgttacttgaggaaaacacatccccccaagttgtttccattcaaaaacctaaggaaacaaataacgtttcactcctcaaacaagaggaaagggaatgggttatatttatttccattccattaggataccaaacaactaataagggtaacacttattattatcctttcccctccttatcaaaatcctttccattccgtttacggtattcataccaaacacccccttagtatattttctaatgaaatttgtgatatgatatgcatgatataaaataattctatcaaaaatataaaaagtaagtaaacttacatgtacaacttaatagatgggtgatgggttggaggttaaacgagtgatggatcgggtgacgggtgaagaaattctcacccaccactcgctttccatccatttaaattaggtttttcatccatttaaaaaaccgggttaaacaggtgatgtatgatccatcacccatttccatcctcaaacacatcccgatttgtttactgcaccaccagatccaccagtataaccacccgaaaaatcatcatgccttctactagccttgtaacctgctcccggtgagaagcttcttccacaagtggtggtcgctggacctccatctccttcttccccaaaaaattttccatgacacccactcgacccttcatctgtgacaacctcttcttcgtccacctctgaagttttggggtcgtcttcctcctcaagctcctcttgaagtaactttaacttccgttggatgggagagaacgcttcattgattatcttcaccagatcttcttgaagtttctcgaaactttttctcacgttttcctctacctctttcgtgatttcctttccgatctccttcatttttagactaggagctcttgcgattccatggcagatttctttttttaaaacaagaaaatcaggcacttaatctcccagaatagtggtgctctgataccattttctaagaaccaagatgactcttagctaatttctcagcataacaacaaatttagagaaattaagaagaattactaatgaatatttaaagagaaaactactaagatatgattgtattgatgaaaaacaccgattacaacctaaccaagaggttggagctctcccaagtaaccatttctctcactaaacttatcaattttcaagatgccgtttactactccccttagcaaactacccaacttattccccaataaactaaagagataatatctaaaatacccttccccctacaatattagttcttagcaccatcaaactgggatggatggttttgtaaggttccaatttacttctccatcaaaatattttaggattttttatctcatgtattttagagtttcctcgtccctttttatctgataagattcttctgatgatttgattttatggtaggctccaatcagcaatattaaagaactgaagattctgaaagctggagttccattttcacttgacttcattccagaggtttgtatttttatagtggttagacatgcttcccctagttttcaaagtaaaagcatccttgttgtgacgatattttttcccttgtttttgtttttattattatcatcacttatttccattttctattttccatgctgataagatgttcatcaccataatcttgtggtatcagaagtgtttagtggagtttattcactacacatgcagttgttcttttgccatgaccgccattcattttctcgtcaaaacaaatctatgaagtttggttttcagactcatggttcttgtagctcttgtgaatttttttttcttctccttgcatgcattcttcaaattacatattgcatataccaggtgctctcctttattttatatttaatttttaaaattctatcatatattttttaatgtcaaacctcaaactaggggttcactgcatcttaggcttaccaggctaatatttctttacttaaccttttccctttatatttgctatcctcttgtgtagtaatcaccataagaagggtacaaactaaattaccctcccattcttttgtatcattctgaaatagtgtcacagagctttgatttttttgccctcatttaatctggcaaatgttctctctatttttttttttttactttcttttgacgggattctcaggcaattgttacggggagcagccagtcacactgtttctgtttattatgcaggtgagttacctgcccctctctgttatgattactgcgtttaagaagaccagcgttacaagacctcttgagggcttcggagttcttatcccttcgaatgagcaacataatggactgaagactctcggtaattgtctggttcacgtgtgtagcgaatcagattttcaaaccctgatttcgtaacattgcaggtactctgttttcatctatgatgtttccagatcgtgctttctccgatatgtatctctatactaccgtngttggaggaagcagaaatagagaacttgcaaaagcttcaacgtatgagatatgcaatgttttaaatgtatgctatagtcatcgtttcaaccttttggtgcctttttcttactaatttatcctcctggtttaatgatcttagggatgaattggagcaaatagtttcgtctgatctccaccagctgttgggcactgagggaaaacctacttttgtgaagtattgatatctttcacccaacttaacatgatttgtgcttataatatgttaaataaagtaactgaaatcctgaaattaagactacgaaactgtatggtgacagtcatttttactggaacaatgcattccctttatatgggcacaattacgactcagttctgagagcaatagaaaagatggaaagagatcttcctggacttttttacgcaggtaatctgtcatttgcttgttgcgataaagttcatgtacagttggcatatcaatcaacttgcattctttcttgctaactccaaacaatcaggatcattaacttgtaggctgcagcaacagagagtatctcccaagttgttaggtttcatgtaacctcgtcgctgagatgaaatttccgttggctaaaaagtgaaagttttgtattgatgttacccaaaacaaaagtattttgcatgttgcttgaagttttggttgtttcagatagtacatcctttgacatgaaaataaatggaaaagcgtatgtcaagcaattatcatctagtttctttgtttctagatactagccgcatttgatcccagatcatttttgaggaagtcagctgaaataccgtagctatccttcagttttcataataaaactttaatggatctgatgtacagtaatttagtgtgcaccgggttaataattgatattaacttcatatagtgagtcttataaagatataatgaacttatatacaatatagtggattttattaatggaaaacatatagtgaaactatatgcaatatagtatgatacataaagacttagacaacaagagcattcgaaattacaaagaacaaaggaaagaacaattgtatcaaaccggttcgaatgaacaaacaaccaccacttccacaatcaatgtaccaccaatcaagactaaactataacaatgagcttctagtttaagtctactttgagttttaatcaccaattcaacgattagatgatcaaaattgcaaaggttaagagttggtcaaacctaaccaagagttacactaggcacatagctttgttaggagtatattagtttatgaattctagttaagttagaaatccaatacctagttggattaggattcctaattggattagaattatagtttagttagaattctagtaatagtaggcgtgtgattaggagatataattagcttaattcttatattgttagtttaattcttatcctcgttttaggtttatctttagtcgaacttgtaccctatataaggggcctttatttcattaataatatagtttattttgagtttaaacctttacttgtgattgtttgcttgagaggttattaatcgaaccattaataacttttcaggattgttaagtttttagtgttaaacatcttaatttcaggagtgattttaagagtgtttagattcttgtattcaagtttcaggactgatcttgaatcaagaaatatccctagtttcgactaatatcataagtagttcgaattcttggagtcttttcttcaagattcatattcataacttgattatttagacttcttggttttgtaatcatatcaagtggtatcagttttccagggaggagaggatacaaagggttctctttgatcaaagaagatccaagggcatcaataagaatgacacttgcaataagttcgagtgatacaaacaacttcaagactcgatcttttgctaccaagaaccaatcttgacgcctgaagattgttaggacaaaggataagaagtgtttctacatccaagattgcattctttacgtccaagattgcgtcaagatccattctttaagttcaagaaaggagtagaaagcattcgaacactacttaaacatgacatccgagatggataagctggctatggccatgagtgccttggcacaatcacaaactgagtcacgcaaccacatgggtaggatggaggcacgtgaccgtggattgaaactagatgactatagtggagatggcaatccagaagacttgttggagtggatttgccaactaggcaaagtgagtgattataggggctttgatcacaagaagagattcaaggttgcttccattaggctcacgaagtatgctggaatacggctcgaaggattgcatgcacaaacttcttgcctaatgactatgaacaaaaacagttcataaggctcgcatcaataagccaaaacacacttagtgtacacgaatacagcatggagtttgacaaattagggcttatatgtgacatagaagagaaagagcaatacaagattgcaatgtacattaaagggttgaatcgatatatagccaagaagatcgaagtctcaacttatcacttctttgaggatgtgactaaattggctaagaaattcgaagagcatgacaaagaagaagggcctaagagttcttacacacctaagtatgactctagtgctaaagggaaatcaacagttccctactcaaggtggtcggaaagacctaagaaccccactacacctaaggaggacactagcatggagaagacaaaagtggccgtacctaaggagagtttaattttgtgttttatacatctttgcttaagagcttaacaattgaaactattaataacttttcaggatggttaagtttttagtgttaaacatcttaatttcaggagtgattttaagagtatttagattcttgtattcaagtttcaggagtgatcttgaatcaagaaatatccccttgttcaactattataattgatcttattcgagttcttggagttaatttcttcaagattcatattcatacttgattattagacttcttggtttagtaatcatatcaatatcattagcattaatttacccccagggagattaagaaaggattagcctaatcaaggcgcttaagaagtttttaggaaaaatcgtgcttgttaagcttaagaattgaacttctttcaccatttgcccttgattctcttgttgaactagaagatcttggttcatagtagatgctcctgcatcatagtagagcatttaattttaattttttaacatgcacgaagatgtaggtagtgtagtatatatcgtgagacgtggtttaacatatagaaagatgtagtttctgcatgatatagtgagtttttgcatgatatagtgaatgtctgaatgatacagtggatcgttccgaattgttgtagtttgtatgatatagtatttttgtgaatgatatagtgagtttcttcatgatacaatgggtttctgaatgatatagtggattgcttagaaatgatatagtgagcttttgtatcatgtagtaggtttctatgtgatataggttgttaaaagatgatacatgcttttggcctcatgtactctaatgttaacgtgaacccggtccttgcaagtcaattgcagttttttcaatattaagctatttttttttttttttttttttttttttttttttttttgtacgggaatatttagcatctttaccacaaacataaccatacgaatattatgcggaaattccagtctgaagtcttaacttttcaaaattaaaagcttctatattatttttggaatgaaaaaaaatgagctatggcatgttattttgaaatacaatgagtctcaaggtgcatagtggcttcaattctacgaataatgaatggactactgatttctaattttttgttccgggcttttgcattaggtaaccataaagatggactctctgtgggaagaactatttcctctggatacaaagctgcggagcttgtgatatcctatctcaactctacttaagatgcctaaatgatcgaggagactccgtaagtcctttctctgattctatctttgaactgagtggaaacacgactgtggtctaaagtagttgatgtctcagatatccagaaatggcgttagtgatattcaggagctgtccattgaccctttgattcattgttgcagtttactgaaagttgttagctggtctcagaaaaacgaaaggaaaaaagggggaaaacaaaaacaaagaaacgtagattgtggtgttaaaatcaagaattccagagatttgtaccttctttatcagttgaattgtttacagtgtgaatcaagaagttagctcgaccttcttttcttgtgaatggtaagatttcgtgatcatcaatacttgattgtgctgtttgcaacttcaacggtaagatttcctgatcttacagtttaattgcttgtgctgtttgccactt

SEQ ID NO: 23 - DNA, 1575 bp, synthetic construct
  misc_feature 1..1575: note = F420V mutated Beta vulgaris PPO2
  variation 1260: note = n is any nucleotide
  source 1..1575: mol_type = other DNA
atggtaatgctatacgattctcacctctcaggagtctcaactcatcttcaactatcgcaggcatttcccaggaagaacccattaatggccaaagtgtctgagccgggtaaacccacttctgctaaaaggattgctgttgttggtgctggtgttagtggacttgctgccgcatataagctaaagtcccatggcttgagtgtgacattgtttgaagctgatactagagctggaggaaaactcaaaactgttgcaaaggatggtttgatttgggatgagggggcaaatactatgatagagagtgaagcggaggtcacgagtttactcgatgatcttgggcttcgtgagaagcagcagtttccaattgcacaaaacaaaagatacattgcgagagacggtcgtcctgtgctgataccttcgagtcccattgcacttctcaagagcaatatcctttcagcgcaatctaagctacaacttatgttggagccattcctttggagaaaacgctatgcttctaagatttctgatgagcatgctcaggaaagtgtgggtgagttttttgagcgacattttgggaaagagtttgttgattatctaattgatccttttgtcgcgggtacaagtggaggagatcctcagtctctttctatgcgtcatgcatttccagaagtatggaatattgagaacaagtttggctcactaatttccggattaattcaatctaaactgtctccaaagaaggaaaagggtggaggaggaaagccttcttctaatgaaaagacacgcatacgtggttcgttttctttccagggtggaatgcagacacttgttgacacaatatgcaatcagtttggtaaagatgaactcaaactacagtgcaaggtcctttcattgtcctacagtcataaggggatcccttcttcagaaaattgggtcgtgtcttctgtgtcaaaaaattccattgaagatcaacaatatgatgctgtcatcgttaccgctccaatcagcaatattaaagaactgaagattctgaaagctggagttccattttcacttgacttcattccagaggtgagttacctgcccctctctgttatgattactgcgtttaagaagaccagcgttacaagacctcttgagggcttcggagttcttatcccttcgaatgagcaacataatggactgaagactctcggtactctgttttcatctatgatgtttccagatcgtgctttctccgatatgtatctctatactaccgtngttggaggaagcagaaatagagaacttgcaaaagcttcaacggatgaattggagcaaatagtttcgtctgatctccaccagctgttgggcactgagggaaaacctacttttgtgaatcatttttactggaacaatgcattccctttatatgggcacaattacgactcagttctgagagcaatagaaaagatggaaagagatcttcctggacttttttacgcaggtaaccataaagatggactctctgtgggaagaactatttcctctggatacaaagctgcggagcttgtgatatcctatctcaactctacttaa

SEQ ID NO: 24 - protein, 524 aa, synthetic construct
  REGION 1..524: note = F420V mutant protein of Beta vulgaris PPO2
MVMLYDSHLSGVSTHLQLSQAFPRKNPLMAKVSEPGKPTSAKRIAVVGAGVSGLAAAYKLKSHGLSVTLFEADTRAGGKLKTVAKDGLIWDEGANTMIESEAEVTSLLDDLGLREKQQFPIAQNKRYIARDGRPVLIPSSPIALLKSNILSAQSKLQLMLEPFLWRKRYASKISDEHAQESVGEFFERHFGKEFVDYLIDPFVAGTSGGDPQSLSMRHAFPEVWNIENKFGSLISGLIQSKLSPKKEKGGGGKPSSNEKTRIRGSFSFQGGMQTLVDTICNQFGKDELKLQCKVLSLSYSHKGIPSSENWVVSSVSKNSIEDQQYDAVIVTAPISNIKELKILKAGVPFSLDFIPEVSYLPLSVMITAFKKTSVTRPLEGFGVLIPSNEQHNGLKTLGTLFSSMMFPDRAFSDMYLYTTVVGGSRNRELAKASTDELEQIVSSDLHQLLGTEGKPTFVNHFYWNNAFPLYGHNYDSVLRAIEKMERDLPGLFYAGNHKDGLSVGRTISSGYKAAELVISYLNST

SEQ ID NO: 25 - DNA, 37009 bp, synthetic construct
  misc_feature 1..37009: note = F420M mutated Beta vulgaris PPO2
  source 1..37009: mol_type = other DNA
tattccatcgaatgtagcaaattgactgtccgttgcaatttcggagtttccactcgtcgcatggtaaatggtaatgctatacgattctcacctctcaggagtctcaactcatcttcaactatcgcaggcatttcccaggaagaacccattaatggccaaagtgtctgagccgggtaaacccagtaagtcaaacattcgaatcacaactcaagcaaatttgtcttgtttgcgttatattttgctcatttcagccttttttgtttttccgacctttgcatactgaatattgtgtgtgtgtgtgtgtggggtttcagcttctgctaaaaggattgctgttgttggtgctggtgttaggtaaattttcgtctcttgcagagtttttgagtcatttgggaattctatgtgaaacttgtaactcccttcagtccaacgaacgcagtacaattttctatcaaatcatggtcctaatttccaattttccatatatattgttggaattatattgggattgtctatcactattaatagtattaggatcaattgtagagaagcacagaaatttttgggatcgaaagaatatctggattgccacattaacagcagatataattcttccaattggtttttggttcttcctaccttgacttgtctggtcaaacattataaactttaacctttaatatccattaaagtaaactataggatttttttgtctaaaacatgcttatataacatgaaatttgtgagaaaccaccttatatatatttttttgcgaaaacaaaccttaaacaaaattattatcgtgagaacaaaccttatgccaatttcgatcattgacccaaggttttggcattgaccgtgtcatgaattttgttgggtttaaaaagtcatgtgtcttgcatacgaaatggtaaatgcgggaaccttgggtcaatgtttggaatccgcataaggtttgttctcccaaaaaatgtttttgttcaaggtttgtttttgcaaaaaaacttatataaggtgctttctcagaaatttcatgttttataaagtagtatttgacaaaaaaccctaaaatatattatagaattattattgactaaattgtgtaaaaatgtactcttctaaaagtacattatagtattttagtggaacatttgcgagaaactactttataaatacgatttttgcgagaaatttcctaataaaaaaatgtgaagtgcaaaactatcttattgataattttctactccctcaaatccaaaatactatgaagtctttcctttctggtttgtcccagattagtttgtacgcttccatctttggtatgatcccacttttattatacttattagttttacgtgagttccttactctatctcttttaacaaaaatactcaactatctctatccaataaaaagttccttactagtcctatcacatctgctttttaataaaataacgtttgataaccacacaacttatatccttaaaatacacgttcaaccaagtgttgagattaatttggacggagggaataaatattttttgaggcatattggtagcagtattcggattccgataggttgactatgtttccaatgttgaccaacacttgccttgcatgtaattctaactttgctcttttttattcttcatttccctcgtattccatatacaatgtttagagacccattccttcctcttctcttctttcccttccttactatgctttgccataatcttcctcaaatgagtgcaaattaatttgtcgttgatgtaggccaactgattgtagcacatcttcatagttcatacctcaacacactcgtaattatattataccctacatgttaaatggctcatgaagctttattttatatcatacttcctccgtttcacaataagtgtaacacttttcttatttggaataatcacaataagtgaaaccaagctccaaatggtaagaaaagttcactcttattacaaatataccaccaaaaagtaagaggggatcacaacttcaatacttcttcactctactttattgtggtcccaactttctctctctaaattccttggtaactccccactttctctatgtttcacttatggtgaaatggaggaagtattttgtagtggtatttagctactaggccttggatgatatacaatcatacaatgtatttatattcacgataatttgctgcccaccttgattaccatgatttccaccaattttatcaatttcagtacttcaccaccccgaatttatattttttatttccaaccttggtatctccatttgtctgagtgcccgatccatttgtatcgcctccagaattgaagaagcttcctgcagctagacaattaggaaggttaaaaaagtttggagatggtggaggatagccataataatcattgttgggaggtggaacttggaaggttattgtagggttgaagtccttgatgaagaagaattgagttcaaatgagaggaaaaaggagcagggaagagggacaataagaaaaaaaagggtaaactaaaatcacgtgtaaggcatgtgcagatcaacatcagaaagcatagtcaacctactggtattagggcactgatacctttttgggtcaaaatttttttacaaggtatttcatgaggtagttttgtccatttttttttttacaaggtatcgtctcattttttttttatcatttagtttctcgcaataagtgtatttcatgaggtagttttttccaaaatttcctcatttattataaaatacctcatcttttccataaataatgcaatgtctagacttttacgctgtttacacatgctcctttgaccatctattgacacacaaggaaaaatagagtagagtcatgcaggatcttgttagatttttctcgatatatactttcaaaagatcaatttttttataattttttttttgaggggattttttttttataattatgtacttatcaaaggtcaaagttgtgcaccgggaagcataaaactctatgtgttgcaatttacatggaaggggaggagtataataagagaaaattatggtaaaaggttcattcctggagatcatgagaaaggaagtagaaagaacaaaaaagaacaatgggagtgcttttcaatgtttgttgtacgtagcatttattcatttgctataatgttttgtgacattgtagtggacttgctgccgcatataagctaaagtcccatggcttgagtgtgacattgtttgaagctgatactagagctggaggaaaactcaaaactgttgcaaaggatggtttgatttgggatgagggggcaaatactatggtaatgtttttgattattgcaggtcttgcactttagcgcacaattaatttctggatttttttttgtactgtggtggttatggtcatcaacatgtctcacccactgtgcttgcagatagagagtgaagcggaggtcacgagtttactcgatgatcttgggcttcgtgagaagcagcagtttgtaagtctttcattatctgaatggcacatactttatttcgaaagattgtaattgccttttctttctagatggcttcatcttcatgttgctttctgattcagtttcgtggctaactttccaagtttgtctgattgctaactctgtcatagccaattgcacaaaacaaaagatacattgcgagagacggtcgtcctgtgctggtaagtttgcttgttttacttttgacctcttttaagatctttcaactctggagcctggaaacatggtgatgcaggaggcaagttctctctattttacatcctttcttctctgtatcttatgacatttgcctcttattctgtgcagataccttcgagtcccattgcacttctcaagagcaatatcctttcagcgcaatctaaggtcgttttatgttaagacatacttgatgctgagagtttattgaattcttaaccttcttcttattttttttttatttttttagcaaaaggtaagtatattgcatttaccaaaaaacagtatgtacaccaccacagcagccatgtcagaatctagaaataccaccgaaaaaatcctacacccaaccagagacagttatattatatcctactcctaagtttctgtacccaatttacatcaatattggtccatttacaagatatttttataattcacagaagcacatcagttttaattagtttaataatgacctctggatgaataaccaactcagaccatatagccttattcctggctttccggaagttgtacgccagagcagcaagcacagcaatgcaaacctgtttcttatacctccttttatgtgtcttagcccatctcttatagctagtgaagatacagtcgtgtgcacaggattgaaccccaatccaactagcgaaagcctcacaacattatgactataaatacatctgaagtataaatgctgcacctttttctcctcttgcctgcacggtatcagaacaaatcccagctttagctaacaattccctggttttcagtttattcaatgccatcatgcaagcaatgaaagaatgttttggaacattcagtttgttccaaacacagtgagagcaagggacctttcctgcagttccacttagccacttatatccctgactaatagtatgactctttgcaccgtaaattgatttcaacttaactttttcataagcagtgaattgtgtgttgttagagtgtctagctgtctaggagattgggagaaaaggagggaccaaggagatagaaacacacctttgtgtttctttgtgtatttactttttagggtgggtcacgttttctgagaaatttgggaaaaggaagaaatagtaacacactttcccatttgtataacctgtatactggagctccaatataatttgcatttttttttgagctgcaagaatatgttgacaaacagttattgcttcttcctcagctacaacttatgttggagccattcctttggagaaaacgctatgcttctaagatttctgatgagcatgctcaggaaaggtaatgtcaagacatgtgttacctcgccttaattttcgttccaggaggtgagcatgcatttagaactaaaaggcacaaagactgttggtggtcttgcctgttcaaatataatggagaggagttttcgctacatttaccctctcttgaagtggggttgaaatatagcatcaagttgaatgcttgattaagtttaaaggacttgtgtaactctttttctgtttactgtgattacatgacctggttgattaacataatggtctgtttatctgtagtgtgggtgagttttttgagcgacattttgggaaagaggtaatggtttaccatagtatttctgctttagtggtaaattgtaatgttgctgataattatacttcgctgcagtttgttgattatctaattgatccttttgtcgcgggtacaagtggaggagatcctcagtctctttctgtaagtgaacattttgtgcttcactcccaattttttggaggctggaaatagattcttttccagttgttctgtcaaaaatagatgtagctttattttgaatttgaagttcccaattgttcattttgactattactgattattgctaagagtggcattatgctattatgctcctaaaagaaaggtgaattttgacctacatatagtataatgtatcaatattggtttaattgtttgttcttttgttccttttggtgctcatcttgcgccttgttctcatcgctcgttttttcatgttgcacttgatttaaatttgctcagcttaacttgtctttttgaatttatattacttattgctatattttactaatttcgttgaaactaattttttgctgaacttttcgttttgttgaaatcatttttctgaattaacttgattttcctgaatagaattgaattttggtgatcttaccttttctgcagccttttatttctttcttgtcctttttccaatctcatttttttatatttccattgtgttgacatcttatcattaactgtgcagatgcgtcatgcatttccagaagtatggaatattgagaacaagtatggaccataagacgtttattttaatcgacatgtatgtttcttagtttatacatatattaattctgtggtaaaaaaaccgaacaagaatatctttttttttttctatcatcaaaaagggtgaatatatgtagaggaaaaagatttgaatcaagatattagcctaaagcaataataatgttagtaatagctttaataacaaattcaaaacgtacattaatgaaccgagaggccggaaaatagttaaagtgaccactaagagaagcgaaggattcatgatgggttttcaacccagtagggcaaatttgttcaatgttctttacaaatcaagcttattaccttgtgggtgtttttgctagagatgaatgatagaattttccctagttggaagtcttttttggttactttatgggagctagtgatgtaatttgtttcgccttatggcatttcctaacatgtgcttttgtgatgtattgaagctttttttttgccttaatttatgctggattttaattttgttctttgtttcatttttcttgcttttgaaaaaaatatatagatatgtatatattaggattggtcgaggattttgagggaagggaaagacctaagaaaacttggatgagggtgattgatagtgatatgagtctatttgggatcgaagaaaatattcctttggataaggtgtagtggagggttgagggagcaaatttatgcagattagcttgacttaaagtttttctttttgattatttttcatttacttgtgttttgcaaacatttactcatgaatgatgtaaacttcttcaaccaaatctctggaaaaaaataatctacatggaaaaaacattattaatgttaacttgacagagatcccatccttgtgaagcagctagcaattaggcatctaacaattgacattttaatggacaggatagaatgtctcttgatagtcaataccctctgtttcattgtatcccatagctactaatctagtttgtatctttccaaagaaccattattttgaagtttcaccttgaacacccattttgaaccaatatgtttcttgcccttggggagaggggctaattgccatgttttgatgcggatgcaaagacacttgttctacctgagcctattgacttgatcatggatactctagggtttgaactcaagggaaagaatcaagtcttggcatgtgtggtgacatggcgtggggatggagtaaagaagagtcatagttctgttaggatatgttcttgcttgctacatagaatcgtagttctgttaggattgctatgatattatatctagtagatagattttatagttaattaggataaacatgtgatgatcatgttataataggcatgtgattagaggataggattagcttaattcttatcttgttgttagtttaattcttatcctagttttatgtttatcttagtcgaagttgtagccatataaagggcgttccattcattaataatacttagttttgctttgtgttttaaacatacttcttgattattgtttgcttgtgagctaactaatcaaaccattaaagacttttcaggagttttagtgctaaacatcttaatttcaggagtgattttaagagcgtttagtgatcttgaatcaagaaatatccttgttcttgttcgactaatatcagtggttttgttcgagttcttggagttaatctcttcaagattcttattcaacttgattgttgagcttattggtttagtaatcatatcaagtggtatcagttttccagggaggagaggatagataggattctctttgatcaacaaagatccaagggctatcaacaaggttcaaacattgctgcttgttcaagacttgatctttttctaccaagatgcattctttacgtcacaaggtagtaataacaagattaagagtggtttttacatccaagaatcaatctttcacgtccaagatttcatctttcacgtctaagattcattctttaagatcaagaaagttataacaagcatagaagaacacataaccatggagtccgagatggacaagcttgccaaagctatgcaagcacttgcaaagtcgcaaactgaatcacagagtcgactcaatgagaatactaccacaatcaatgggattggtagtaacatgaataggttggaggcacgcatggatgccattgcaaccatcatacaaaagaagcttgatcggaatagtgccaacttcataggtgccaattcagaggaagagttggcagaacgtgaagaaagatcatccaagactacatacaatgatgatcgtggcttaaagttggatgactataatggagatagcaatcgagaagacttgttacagtggattcgacaacttgagaaggtatgtgattatagaggctttgatgacaagaaaagattcaggattgcctccataagactcacgaaatatgctggaatttggcttgaaagcttcaaggcacaacgagccaagaaaggtaaagaaaagttgtgtagttggacaaagttgaaagttcaagcttaaagagaagttcttgcctagtgactatgaacaaaaatagttcataagactctctactataagccaagacacgcttagtgtacatgagtacaccatggaatttgacaagctagggcttatatttgacatagaggagaaagaacaatggaagattgcaagatacatcaaaggcttgaaccgccacattgccaagaaggtggaagtatccacttatcacacctttgaggatgtgacaaagttggctaagaagtttgaagaacatgagaaggaagagaagcctaagagttcttacacgcctaagtatgatactaatgctaaggccaaggctagcttcctactcaaagtggtatgaaggacctaagaggctaagaacctcaccccacctaaagaagacacaagagttgagaagcctaaagtcgtcgttccaaaggagaaatttgaagagatgagaaagtgcttcaagtgtcaaggaaggagacacatagcaagcaattgtcctaacaaaagagtcctcaccatgagacaatacctagctttgcaagaagaggaggatgtctattagttcgtccctgatgaagagcaaacttaggggaagaagaggaggaggatgcttttgctgaggatgatgcaaggctagtaggggtcaagaggcgcaccttacatgtcgaccatacacctagcatggagcaaatggaaaaatcttttccacactagatgcaaggtaggtgactatatatgtaatggtataatagatagtggttcttgcactaatgttattgtatctgaggtagtgtcaaagctaaacttagctacaagggcacaccctaagccatacaagttgagtttgctagatgatagcactggcatgagagtaaagaaacaagctttgatttcattctctataggggttataaggatgagttatggggtgatgtattgcctatgagtgcatgtcatctcttgcttggaagaccattgcagtttgataaaaaggtcatccatgagggggactctaatgtgtactctgtgttggttggttctaagagggtatgtttgcatcccttagctcctcattcagtggcgccaaagcaaccacctaagacaccaagttactttctatcttcaagggagttcgaacaagaggtggaggaagaaggttgtgcttatgccttgattgtaagacatgctgccacaagtgtcaagactactagcaatgagaagctcgaagccttgatgaaagagtttgaggatgtctttctagaggaactacgacccttgagaggcatagaacatgctgtagaccttgtacctggcgcccctttgcctaacaagcctgcttataagtgtgatccagtggcatctagggaattgcaacgccaaattgaggacctaattgaaaagggctatttaagggagatcatgagtccatgtgttgtgccagctttactagttcctaagaaagatgacacatggaggatgtgcatagatagtagagcagtgaacaacattacagtcaagtaaaggtttcctatgcctagattggaagatatgttggataagttacatggggcatcaatcttttctaagattgatcttcgaagtggctaccaccaaatgaggatcagagaaggtgatgagtggaaaacaacattcaagaccaagcagggattgtatgagtggatggtgatgccatttgccttatgcaatgcgccaagctctttcatgagcttgatgaatgaggtacttcgtccgttccttaacaagtttgtggttgtttacatagatgatatacatatctatagccaaaatgtggaggaacacttgttgaacttgcgtagcttattcatgaagcttagagagcaccaactctatggtaagattgatggcgacgaggttgacgggggattatggcggcagtgaatcaccctctttgccggtcactgaaatacaacctgaggtatctttaaattctgtaattggattgactaacccaaaaactatgaaattgctgggaaaaattgctggatgtgaagttgtggtgatgattgaccctggggcaacccataattttttatcactagctactgttgagaaattagctattcctgtgtcggaatcggaaggatttggggtttctctaggggatggacaggcggtgaggggtagtggaatttgtagaggggtgttattgagtttaaatggtggagttgaagtggaaacagattttcagcctctgggtcttggtaattcggacgtgattttgggtgtacagtggctggagacgttggggacagtggagagcaattggaaaacacaaacaatggggtttgaaatcgagggtgtcaagttcactttgaaggtgacccatcactggcgaggtctcgaatctcactcaaagccatgatacgtaccttatgtaaagagggtggaggtttgtggcttgagttgaaccagattgagcattatcaggagaaaacaccgcattcatcagccttacctgaaattccagttttcttacagagagtccttacccaatttcagtctgtgtttgctacaccagaaggcttaccaccgataagagaacatgaacatgcaatagttcttagagaagggtgtaatccggtaggggtaataccgtaccgttatccacagttccaaaaagatgagatagagcgcctcatcaaagaaatgttggcttccggaatcatcaatccttccacgagccctttctcgagcccggtgatattagtgaagaagaaagatgggtcgtggcggttttgtgtagactatcgggccctcaataaagaaacggtccccgataagtatcccattcccgtgattgatgaattgttggatgagcttcatggggcaacacttttttcaaaactcgacttaagggccgggtatcaccagatccgggttaaggccgaagacactctcaaaacagcttttcgcactcatgaggggcattacgagtttttagtaatgccatttgggttgacaaacgcgccggcaacgtttcaatcccttatgaacgaggtcttcaaaccattcttgcgcaagtttgtcttggtatttttcgacgatatattggtctacagtagttctgccaggaacatgaggagcatttgaccttggtgttgcacaccctagcagctcataaattgtttgtgaatcagaagaaatgtgattttggcaggtcggaagtagcatatatggggcatatcatctctggtcaaggggtggctgtggatatggagaaggttcaagcgatggtggaatggccccttcctaaaaacctccgggaattacggggatttttgggccttacagggtactaccgcaaattcgtacttcactatgctcatatagccaagcctttaactgatcaactcaagagagatgcgtttgggtggtctgaggcagcaactcaagcctttgaaaagctcaagaaggcgatgatcacatcccctgttttggcaatgccggacttccaagagttgtttgtggttgagaccgacgcatccgggtatggtctgggggcagtgttaatgcaaaacaaccgacccattgccttttacagtaagttgttaggtgcccgggctcaattaaagtcgatctacgaaatggagttgatggccatctgcatggcagttcagaattggagatattatctgctgggtcgacatttcctcattcgtacagaccaacagagtttacgtcatctcactcagcagcgagaagtaagtactgccttccaacgttggatgagtaaacttatggggttcgattttgaaatacagtttaagccggggtgtgccaaccgggtagctgatgcattatcccgcaagacagtgggagaggttgaattgggtgcgctgatattaactcatggggtggactggaccgacttggagcgtgaaattgaaggcgatcctctgttgtgcaaaattaaacaagacttccacgggggtgctattactcctgtgcacttttctttggtggacaacaagctgttgttcaagggtcgatacgtgattcccagctcttcggtttttattcctaccttgctgcgagaatatcacgattctcccattggagggcattcgggggacctcaaaacatatctcaggatggctgccgactggtattggaggggcatgcgcaaggatgtggcgcggtatgtgcaacattgtagcgtgtgtcaacaacaaaaaatgtctcaacagatgccagggggggtactacaaccactccccataccttcctcggtttgggatgacttgtcaatggacttcgtggaaggcttgccatcttccaagggggtaaacaccatcctcgtggtggtcgatcgtttgtctaagtacgcccacttcctcccactacgtcatccatttactgctgtgtcggtggcaaatgtgtttgtcaaagaggtggttcgtttgcatgggtttccttcctccattgtttcagatcgggatcgaatttttatgagtgtgttttggcgggaattatttcgtttacatgacaccacactcaaacgaagtaccgcgtatcatcctcaaacggatggtcagtccgaaatcgtcaatcgagctctggagacttatttgcgttgctttgtgggggaatacccgcgctcttgggctcagtggcttgggccgaattttcatataatacttctcctcatctctctaccaaaatgaccccgtcaaggtcctttatggtagagaccctcctactgtgatacgggttaatcggggagcctcacctgttgaaagcttggaaaacatgctccaagagcgagacgcagtattagatgccttgcagattaatctgattaaagctcaacagaaaatgaagagtagtgctgatgctacaagaagagaggtgcattttaaggtgggagatcgagtgtacttaaaattacagccttaccgtcagaaatctttggcttaacgcccttatgagaagttagccgcccgtttctacggaccatttactattttacagaagattgggcaagctgcatacaagttacaacttcctgtttctagcaaggtgcatccggtgtttcatgtctcccaactgaaacaggccgttggttccattcccgtttcagccactattccagagcaattgtcttctgacttggagttagaggtggaacctgatgaactcctcgatgttcgtagtgtttctagaggccagcacacttacttggaagctctcattcagtggcagggattaccatcattcgaagctacctgggaagatgtggctgctttccatcaccattttccatccttccaccttgaggacaaggtgaaactttgggggggtggtaatgtgatgcaccaaactaccactccactactcacctattagaggcgtaagaaaaagggggtaaatcaggaatagtttacaaattctgttgaaaggaatattttgtaattatgatgtcagaggttgttagcaaaaaggcagtagagtaacaataaaaaggggaagggaggagagaagaaggtattgagatttttgtaaggaacttggcccttgggagagttgggagcctctcgaaagctcaccattatcttgtgaatattttccttcctggttatatacaagaaccttcctctgtcaatttcttttctctctaatcttatttcttattctgttttctggttgccattgtttgaagttgcttgttgtgcttgagtaaatacgtgaagtggtgaaacccatctgaattcatcacatctattccaagtggtataatacaagcttgtaatccaaatctaatgagaaatctaagttatgaagaatttcaaaagaactaagtacccttgttttggatgcccaaggatttacttgccgctcaagttaatgctcaacgtgcaagatacaacctctttagtatcccaaggtagtttccataagaattaattgagctcaaatcaagaacaatatttttatgtattaatgtgaacacttcctgaattatattagatatatggtctgaaggttggaagaaagattagcttttaattttaagtttgagatagtttttagaatcgaggaaagattagctcttaacttgtaaactaaggattgctttataagtaaaacattagttatggaactcttaaaattggttttgaacatttctagttaaaaatcccatgtaattctcccaaactagcttaaaatctcacatttcacaagctaaggagagacaaatggcgttctcttgtgaaacaatctaaaattttcattaggctactgttttcaagtatttatatgttagaagtgccgcatataggtacataaaataagtttacaaacacaagtaggaataaggaaaactaaaagagaaacttcagccatacaaaaccggctgaaatcagctactactttctactttctagcttcaaaatctgattgcaagtctcctttaagccaatcaccaatgaaaacctttcctccacatgaagtgtgctcaaatcaagagaagaaacccatcattcgcctatagctacctgggtcagatgaagatacggcaaaaaaaacgctggaaatcagtgaaccaaaataagcaccaattggatgctttctgtccttgctacattttcttctcataggactacttcaagccatacatgaataagcagttagatccagctcctagcatccatttgatcgtacaaatgagctccaaaaagataagtaaaaccaagcagccaaaacctaattaatactaatgatgaattagttgaatagctaatgacgatgaagcaacactttagtaggaatagtgttaattatgatcaatgctacttaatcttctgattaatttttggaaaaatgtcatatctaccttctgtatacacttattcataactatatcgtattattattatttttaaataactaccttttaagtaccaaaacctaagaaatcaggcacttgatggattccatccaaagatccatttggcggggcccactaactgacttttgattttttgcctttcctcttttggttaatctcaatggttcatcaataacaactcaatcttctccccatttcatcaaatcatccctaaatcagaactttttcaaattcacccaaatgaggttatggaaacctctaccaagtttattcgaccacttttagtctagctcaaagttttacacttgcttcaaaaactaagatttattaactttagaaattaggtttttatttttattttttatttaactttgtaacaatcttaaataactcaggtgctttctagagtttggctttaattgtttttcccttggttatgtgaaagaagtatgactactttctccaagactaaagtagagagcaaaaaatgcaattctggaatttcttgcaaaagaaaaggaacgagttaatgataatgaaaaacaaagaaaatgatgagaagagaggagctgaatcaatcatgatcatgtattttaaagttttttttgctattgaagtgacttaagaagaggaaagaggatgagtgaagacaaacaaaagaaaggataaatagagggaaatcttgggcttagaaaggtgaaaaggtaagaagatgagttagtgggccccaacaaatgtatctttggatataatccgtcatgccactgtttggggcttgcttaagtccatacattacttcactaattttacaaaatttattttcttgaccaagaactgaaaaaaccttcagtggtgatctattaggttttggaagttaaaaggtagttatttaaatgtttttaatataaaaggtagttatttagatatttttaatataaaaggtagttatgtgaataaaagtgtatataaaatgtaattttttgacatttttgccttagtttttcttgctaattcaccttttcaacttgaccaagttgctatgaggagaaaacgagcaattattaagcaaatcgcaacactagcattaatccatggcccatgaaactctccataattagagattggattagcacttagtagaacttcttgctcctgctccaggtttccattacttctttatctaagtgcatcaaaaggttgttgggttatgaaaggtggtggttgtgtatagtcattgtcaaaatgttgttaatgcactctatttagaggatgagggattgaatagttttcacctcgtgacctttcattcctttttaaaaaaattgataatgtgtattggtcctatgactgtatgaatggtaataagctatctcatgagctgttactatcttcctcagagtctaggtagaagggtttgggctgataattttctactatgtgcaattagtttgttggatttggatatgctagttgatataggtcctttcccttgggccttctcttaatataggcctacagtgtgattgaagataaatcttctggagaatataagaacaatgagatggattggttagaggttgatttgttcttttggtgtaagactatttcgggttctctattggttatgttcagacgccagaatatgtgttggtgattgttttccatgaacatactttatccgcagagacatttttcttttttcttcctataagattatatttgtttcctctcttggtgctcatctcagtgtctctactttacgttaaactgttgacattacttgacaatgcgtatatttgtcgcatggtgctcttccctcactccacgtcgaccccatacatcaaaaaatgccattaaagaatattcgaactcacaaccttgtgttgaaagaatggaatccctaccaatgactcattaattcattttctctttaagaaataaatgatttcctcacaaacttttaggctttaagagcccaaaagataaaaacataaaataagatagacatcaacgtcaagattagccttaaatgcacaaagcacatgtcaaatgattgataactactcacgagttgcaactctttgggcgttgcctaatattaattggatctcttttaaaaattgttggtggttatggttggtggagaggaccatgtaacttttagctggtcacaactggtaatgattgtcacttttactgcccataaaaaaatttaaactgttgaatatgtttctggcagtggatctgacaaatcctttacaagttggcgtccattttgttttgccatgtgactcaattataatacgtgagttttattatccaccaggtttggctcactaatttccggattaattcaatctaaactgtctccaaagaaggaaaagggtggaggaggaaagccttcttctaatgaaaagacacgcatacgtggttcgttttctttccagggtggaatgcaggtattagcatgtagctttcattctgttaacatttgtggttcttccagacatacatccaatgctttttttttttcttgctataaccataaacattcttgtcatgaacattctttaatactgttgctgagcttagtgtattcgttcattcatgtaatttcctctcttgaggttaaaatggcatacagccttacaacctatatccataatgctccttagagtagaatccctaggttataacatagtaccacttatcaaaataaacatggcacacactgcaggacaagaagtaaatccacctagagaactgagcacctagtagtaaaagcagcgatacattactaataacagtagcagggccataagagtagtaaatgggcctcatttcaacactccccccgtaatggtgagagagaagaagcagtctgaactcccagcttggagagcaaaatagagtgttgctgaacagggagaaccttagtgaaaacatctggcacttgatcttgagatggaacataggtaggctgaataaccccttcttcatttgtattgtccctcaggaaatgacaatctatgtctacatgcttggttttctcatgatgaactagatatgctgctatggcaagagcagcttggttatcacagtagataggagtagcactggactttttaatgcgaagatctttgaggagttgtttgatccacatcacctcacacacagcaagagccatggatctgtactctgcactgaccacaagaaattgcctctttgactttcaagatacggggggagtcaccaaggagcacacaaaaccagatgtagaatttacaacacccatcccattcactatcacaaaatgctgttagttgagcactagacttgttcgccatgagaattcaccctgttggcagcttgaagatgcacattagtggggcagtgcataaatttgcttaaatcatgtatagtgaaggcaatatcaggcattgccttgtaatagtgagataaatgagcttccccatcaatttttgatacacatcaggttgttgaagaggatcaccattgtcagcatagagcttgacatgtgagtccatacgaagcctcaatcgtctgcaatttataaaaccatattcatcaacaagacccatcacatacttctttagagataaaaacgatacttcactacactgatccacttcaatcctcaaaaaatatcttaggccacccatatctttcatgtgaaattggccagcgaagaaactctttgcttcctcaatagttgctaaactattgccagcaagaatgaggtcgtccacatacaccaatatagcactgaaacagtgagagttttgcttgaagaatagagagtagtcacacttggattaagtgaatacattttgctttaaagcagtgttagcttggcaaaccattgcctcaaagcctacttcaagccataaagtgacttaagcagcttgcacaccttagttcatttggtgtcacttctgccatcagtacttagctccccctctccttgaactttgatcctgttacatgtttcactatatcctggtgatagcttcatgtatacactatcctacaattcaccatgcaaaaaagcatttttaacatccatttgtttgcaagaaccaaccctctaaggatgcaacaacaagcatgtggtcatctttgctacaggggtaaaagtctgctcataatctattccatatctctgtctgtcacccatgattacaagccttggcttatgcctattatttgtgccatcagtgctgtattttgttctgatccatccatgtgagggatggctcatttctacaaaatcctagttccgttaggatttgtgttgttttcctaattctagtaggaataggactcctaaaatcctaatcctcctagttctgttaggagtttaaaagttttagtttgattgtaattctagttgtgttagaaatccaaatcctagattcatgtcacgtatggttagaacatggctagtaggataatttgtcttgtgatgtccatagccttggcatttgtggcacctaactttcaatagcttgtcttctgtctccttttctttctccttctttgaggaatcaacgtttttagagctatctaaaccactagcatcaatattaggtttaaaagtgctaaaagatttcgaatagttcttacttgcatacaatttctttttctagtttatgtagcgtcaccagggaacaaaaactcggccgttccgttctggaacggccgctttgtaacggatttcagagaggccgttccgttaaataccgttctagaacggtgatttggaattcacaccaaactcggcgcgatagcgttacgtaacggtgtaacggcgttccagaaccgttacaatcacataacgtccgttatttgaagaagaccagttcttttggtggaggaagaagaagagccaacgcaagatctatagatctgagttaaaatttgaaaataaaacatgtttttttatttaaattaaagcttacagaggatgtagaactcaaattcgagtaaacccctcctttaatttcattaggttactgcaaatcgaaccctaaattgcaaaccctaatttcgaaaaaaccctaatatgcattgggatgcaacgctgcttctccggtcatggcagagaaggtcgacgagtcatcttcggctgcttttagcactgtagctgccggtggttggcttgtttgcaggttagtgcttgctggttttctttctctcataccgatcatcttcttcttttctctcttctctttttcttttttattgtgtgactgccagtcacgtgataattgcaactcataaagtatctctttctctctcttcttttcatccctttttatttttctttcccttttagtttttattccctcacgtggaatcacctaattttcatccttttttatttttttagttacactcttacacagaagtatgttcaaatatcattatagtacctcaaatattgtatttataagagttttggacataatatgatatagaaagtaaaatagaagaaaaataaagtttaaatgtcacttgtgtgatttttttaaaaaaattcacgccgcgacggccgcgaaacgttctatttcccgttacaagccgttcccgcgataacgcgaccgttcccgcgaacgcgaccgcgaccgcgttttttttccttgagcgtcacatcttgcaagcttcttcaaaggtgagttatgtgtacaactccaatttctctccaatcccctccgtcctcatttaggcctccaaggaagctacttaaacattgatcttcaagttcatcaattttccaaagaatggataacttctcgaactcctttatgtaatcttcaacggacatattcccttgtttaagagtagaccattccatgtacaagctttgtttgtagttagaaggaacaaaacgtcctcttaacaactttttaagcttatcccaagtagagattttgggtttattagctttcacacgctgcctctttactccatccaaccaaatagatgcatatttggttaccttaagcacggccaccttgtatttcttttcttttggtgtctcttaatcccaagtagagcttttgcgtgtgaaagctaataaacacaaaatctctacttgggataatcttcttcttgtttccgaaacaactaattcttatggtagttaggaaagcaagaatggtttctaattcaatagggaatatattaattattattagtttaagttaaatagtgcacgaatctaaatagattattcgtctcaaaatctcacttaagtatagatttgtttggacatctgagggaagaagaagagagcgagataaaggagaattatcactcaatgaatccatatcccgagttttcccatttacttctttgaaagcaatatagttcacgaggtcttattatcagtctatggacataagagtaataatttaagggcaaaaactatgactttatgggtttaaactgatacatgttctgttaaactgatagatgttctgtgttaaaccgatactcatatattcctggttaaactgatagatatatgatttaaattgatacccgtctcagtcatgtcttggattgagacggtctgacacaagactttttgtgtattatatatctgattagaataaatttatcctgtttactaattattttatcttctccagacacttgttgacacaatatgcaatcagtttggtaaagatgaactcaaactacagtgcaaggtcctttcattgtcctacagtcataaggggatcccttcttcagaaaattgggtcgtgtcttctgtgtcaaaaaattccattgaagatcaacaatatgatgctgtcatcgttaccgtgagttttactttgcttactgctattgcaccaatctttcttcttttgacacactgataatggcaatgctgttgtggtttgaagccatgttatggggttttagggatatttatggagtctgatctaatatgttattggataaaattcagatctgtaacgtgactcaatgagattgaaaaaaattgaatcaagataatggattggaaaattaggagctaacctagggtctataagcgatccacttggagtctcataccaagcaggtattcgacattttaggtttatattgctgctatggctcatatgggagcctacatagggtctggtgcttattcctttttcttttgtctagttttggggctgcacatttctgttgtgttttgatatggatagccatcacctgcaattgcatggaggctgaactaagttctataggggagcaaacagtatctgttggaaatttattttcatattgtgtttttaaatgctataatccaaaatttgttgttcccctaaaatgcctaaaatacccttatgtaactgctccatctgtcccttaatagacttcccatttctccaatgcatgtttgccaatacacattttgtattgttaatatcaaaaattacatattagtaaaaattataaaagtttgattttcctaatgtacgcaatgagacgaatcaaacaagacgccatatgactatgttttttcttatacttcctatgttttttaataagtgacatgttttccttttagggaaatgtcacaataagtgacacatagctcaaagtagtaaaaatacttctcatttattacatctttgccattatttaattgtttcacctacctactttatccaatactcaaatttgattggttgaacaattggtcccaactttctctagactccttggtattccctttcccccactttctctctgtgtcacttattaaaaaatggaggacgtatattggaaaaaaattggaaggttttcttcacttatgaatagtggtaaaattagagatgggaaggctattttgggatggatggagtaatatttaaatttttaaaataatgtcattgttttagtgatgaaataaaattcaaggctattttttctagtaattatgttatctgtacatcaccacacgtatcgcgtgcatataagactagtttgatgatattccaacactgttcgaaggaagtcaggcatggaaccatgtttgcttccatatgggaaatattttgcttactctccttcaaacatctacctcattatcccagaatgattgatcgaatctaatacaaatatacaattgatcatatgccaccagggaattacatcaaattaaatttttatagaaggggaatcagtcatagcctcatagggaacgaataagtgatactcgccagtttctttcctggttacttttcctcttctcactagccatcctttatgtatgggtatgctgcatcattcctgccactggttgggactcccgtttgaactatggggggatgggaaagctaagccatcatcttcaaattgagtttcttgagaatgtaagacaccatctgtaagatgaatatagtgcactctatagtcaatgtcatgatctttatgggtttatctgctgaaataactgtgatatacccagctctccatttacaaagttttcctacatattaaactcttgcccgcaattctagaacttcattgtagaacttttcctacataagcatcatttgtcttttctgtagtaaaagttagaaagagctttattttagaacattcgtttttagttttctttgttgttgattactccgccacttttaatacttttatgattcaagtatttgacaaaatcatgtaatttaggtcctctgctgcatgcagtctataccctctctctctctctctctctctctctctctgtggttgtgtcttacttgttgagttactaactccagccattacataaagtaggctggcattatgatgagcaaattactcaagaccacatgttagctcctttttcttttctccttattctgaaaggcaaatataggtccatcttggtgcttctcatgtcataagtaagctgaccccctccttttccagggaataggacaataatccaaaagtgagggttttacatgttgggatttgtgaagtttcttattttacttaatagccgagtcagtgttacaatacatagtaccgtgttacaaaatagtatgtaacaccaagcatgtttatgtgcaaaattgtgcaagactttgttgctggcacgccaagggctgttttaatgtagtttacttattcttttaggtttttcagatgacaatcataaagggaattaggagtgtttttattgtagtcaatccctattgtgctacaacgataaaagaaaaaagcacaagactagaaggagaagtaatgtctaggaaagactcctcacctggggttgctagtcacctacacatcttagaaggcatcaaaccaaagcttattcccctcgactgttttcgggagaaaagaagacaaaattgtttctaacttatactttaccagtttcactacagcatcagaaagaagcaaaatatgctcccacaacacggcgaacctagctttccagatgtgataaaccagaccagcaaaatgattattttcactagagctttgagtctattttttcggtttttccccttcttcctggtaatgtcacgccaccaagccatcatctcaattttttgagatttgacgtaatcgctcaaatagctgagtaagacacttcttgctctaaatactaataaaaaagaggtgaatgtgggtctcagccatgttactcaaatcggataaagtgtctactcttattagggtttttgggtgttggactcatccatttttttttgtaaaatgtcaagattttggtttgaaatgagagattcaagtgtcgtgacatgagtcggcacgcaacacttaaacgtgtcgaagtaacagagggtctcagacaatcaactttaatcaatcacgaaccccaaaatttatgcaacctttgctcatattcagtctctgtaaagcactcaactgcagcacacccacccattcgcttcacctacagcaggagggcacccaagtaattgctatgatgagcgaattattctgttttgccttgctggaatattgctgttagatttgctgactcactggcagttaattatagtcagagaatgagaaatatcctgtagagagagaaagggtatcttttgtatttagctctataaatagctaaggaagggaagggcattgagagtttatgatattataataggagagatttagcctctcgaatgctgataggagcgtagctcttgttggattatcaatactactctgtttgctctatctatttctactcaggttccttcttgtacagtggatccctgattggatttacttcatcaaccagcagataaaattatttgtaggcacattgaaaccattccaaacctaatgaggccaaagtttatcacaaagaatataggagccaaatgtaggcaacagataagagtataattgccagaagttgaagactccaggtattgttcagaaaccttaatgcatatcatcattctgacactagattttccccggagccaactaacaaaaatgaattaaagagattaaggctatgtttagttcacctgaaattttctgatctgaacttatctgatctgatctgaacttattttttctgatctgatctgatctgatctgaaccaatctgattacaagatcttatcttttagatttttctcaatatataagaaaaaatatagtcatgtggggtcttgtttgattcgtctcaatgagtactttattaatattcaattattataatttttactaatatgtaatgaaagatataatgatttttaaatataagcatgatctgaactgatctgatgtgaacttattttttctgatctgatctgatctgattagatctgaaataagcaaaaataaggtgaactgaacatagcctaagcaacaattgagggaaaataagatcattatggctaagataagataaatatgtaatgataaaatcagagtaattatatcagttacactctcaacattcgtcagattgaggtttcctcccaaaatgccaacccacttttctgtattttcacgtccttctctctacccttctaggtatatattacatcagctgtaaaatttttgaaccaactagtagaatactgatctaccctcaactgcctcactttctcattttttctgggcctttttctctctagcacaagtccacataagtgatgcatagcagaaatataattccactagtcatcctcaatattgatataacaaacacatcacccacatattatcatttttaatcgctgcatgcgaggcatacttacccaccaatcaggatatgcataacagcgttcctaattccaaaaccaccatatatcttgggtttgcaactctcatccctagcaacaaggggactttctgaaaaagtggcagattccgcccacaagtagtttgtacggacacctttattatattattaatatcatatttcggcaacacaaattaccagcccagtaaaacatgaattgacatgagactaacaaggggcccaatctaatatcgtacgtctgtactaagcaatgtataaaaaaaagctcaaggtgcattgatgcaatagggatcctaatgtgcataggtgcgcctcattgaagtgaggcaccactaaggataaataaaaaagattgatgtaaaattaaattgtgcaccttgggtgcgcctcgatgaactttttttgtgtgcctaagtgtacctcaagtacgcctcattgatatcgcctcgcctggcagaaaacgagcttgaccccaatcgccttgctccccaccgcctaggcgtgcctcagtcacactttttaaatacattggtattaagtactcagaatggcaaaaagaaactttgggcattaattagacatttcactttttgtgcaactatttgtgacttcagagattgatatgttttctacattacagacttttgtgatggctgcatggtctccactgtcaaagaacattagtttaagtagaagaaatattgctctattaccttcctccctctacaaacaaaatcctaaaatgtggttatgtagtgccaattcaaacttgtagatgcatgactaatgctttcattatgctgtgggtttttatactatgattcatgtccaattacataacaattagctggagtcaggatatgtcacggaaattttaagcctggcaggatgattgtttatattttctctttttcggtgtttaagtcaaagtaaacttctaggctgctcttttataggctagttgggctgttggggagatctacacattaagtgtgaagaaatcttgtctaactccagtttggttgagaactgtaagctgtcataacatttgttgcatgatgaggccttgtgggattatcatgttagctgtaaactctaaacttacttgaaatctagtgttgtgtctccttatttctgtagtcaaaattgaaccttctgtacgtttttgatacctgcgactagaatgatggaattctgaattactgatactattacaaccatctgctaagaacgaagatgactcttagctaatttctcagcagatttagagaaattaagaagaattactaatgaatatttaaagagaaaactaccaagatatgattgtattgatgaaaaacaccaattacaacctaaccaacattcgagaggttggagctctcccaagtaaccatttctctcactaaacttatcaattttcaagatgccttttccattctcagttcctctatatttatactactccccttagcaaactacccaacttattccccaagtaaactaaagagataatatctaaaatacccttccccctacaataatattagttcttagcattaccggccccctaaacttccaccttgtcctcaaggtgggtcgtaatcatcactaaattctgggcctctactcgtatattcagtgtcttgcagcccttcaggccccaagcctaggttatgcagctcgtgttgcggctcctcctcatatagttctctggctggagtgagtgcctcaactataatgaaaaagtcctggaggtggggaaggaaggagtgtctgaaatggtgtggtgtgctgctggtgttatgggcttgtgcctgaaagttttgggtttaaagagatggagtggagaagagtggagaagtgactggagacgtaaaagaaggaatcataatttttgtaagtggtgggttgaaaaagttggtgggaagaattgtttttataaaatgtagtgtaatggtcgaaaaatgggtggagtaagtatggtttttggctggggatgtggtactgggttgaaaataaataggtctgagcttacttgtaaaattggcctcaacatgagcaggcccaatatcttgagccaattccccaaaagctggcaatagagcactcttaattgcattgttgtgggccatcgggctccaaacatatattcggaggagccggacttctttggtgatgtcattagcttggcccattgcacactttcccttaacagcctcaagatcttttcccacttttgtaccccaaccacgtggcttcaccatcctttctttcttgcttttgtcacttttttggcaatatacgagtttgtccttactaccctcatcttctaatgttggcttcctcaccaagcttaatttctggaattttgtccaccaaatcccaccacccatcgtcaacaccatacctatctacaccggccaagaagcctggtcctccacccgaattttcgccacagacaaagcctgaacaaccgtcagttctctcaccggagaagttcacaggtccaccacctgacccactagttgctgatccacccttcacaaatctccctcctctggctgccacaagtagtggttcctccgtaatactcatatttctcgtccaagagccctggaccaccaccggacccacttccaccggcaccaacttgttcaaatgatacttctctttcttttccaaacagcctacttggactggaaaaaccactgcgattgtagcctccgccagatctgtagcctagtgcacctaacgtgcttccaactgcaacccaatagggatggaaatggatgggattcggggagggtggagcatcacccgcatccgtcacccgcatccattcgctccacccgctccacccgcatccatccatccgtcacccacgggtgaaacgggtgggtcggtgataaacgggtggaaccatttagggggtgtttggtatcatgtttttttacaaaagaaacagaatcaagtaacaaaatccgtttctacttgtttggttctatgttgctcagactcgagtacccatgtccgacacgggtacgtgtccaagtgtccaactcagctattttctagaattttttatattttttaacccaaaacaaagtgtccaagtgtcccacccatgtccgactcccgaggatccgacacgggtacttgaggtgaaatgaagagtccgagcaacggaggtttggttagtgtgtaaagtaacaattaccgttacttgaggaaaacacatccccccaagttgtttccattcaaaaacctaaggaaacaaataacgtttcactcctcaaacaagaggaaagggaatgggttatatttatttccattccattaggataccaaacaactaataagggtaacacttattattatcctttcccctccttatcaaaatcctttccattccgtttacggtattcataccaaacacccccttagtatattttctaatgaaatttgtgatatgatatgcatgatataaaataattctatcaaaaatataaaaagtaagtaaacttacatgtacaacttaatagatgggtgatgggttggaggttaaacgagtgatggatcgggtgacgggtgaagaaattctcacccaccactcgctttccatccatttaaattaggtttttcatccatttaaaaaaccgggttaaacaggtgatgtatgatccatcacccatttccatcctcaaacacatcccgatttgtttactgcaccaccagatccaccagtataaccacccgaaaaatcatcatgccttctactagccttgtaacctgctcccggtgagaagcttcttccacaagtggtggtcgctggacctccatctccttcttccccaaaaaattttccatgacacccactcgacccttcatctgtgacaacctcttcttcgtccacctctgaagttttggggtcgtcttcctcctcaagctcctcttgaagtaactttaacttccgttggatgggagagaacgcttcattgattatcttcaccagatcttcttgaagtttctcgaaactttttctcacgttttcctctacctctttcgtgatttcctttccgatctccttcatttttagactaggagctcttgcgattccatggcagatttctttttttaaaacaagaaaatcaggcacttaatctcccagaatagtggtgctctgataccattttctaagaaccaagatgactcttagctaatttctcagcataacaacaaatttagagaaattaagaagaattactaatgaatatttaaagagaaaactactaagatatgattgtattgatgaaaaacaccgattacaacctaaccaagaggttggagctctcccaagtaaccatttctctcactaaacttatcaattttcaagatgccgtttactactccccttagcaaactacccaacttattccccaataaactaaagagataatatctaaaatacccttccccctacaatattagttcttagcaccatcaaactgggatggatggttttgtaaggttccaatttacttctccatcaaaatattttaggattttttatctcatgtattttagagtttcctcgtccctttttatctgataagattcttctgatgatttgattttatggtaggctccaatcagcaatattaaagaactgaagattctgaaagctggagttccattttcacttgacttcattccagaggtttgtatttttatagtggttagacatgcttcccctagttttcaaagtaaaagcatccttgttgtgacgatattttttcccttgtttttgtttttattattatcatcacttatttccattttctattttccatgctgataagatgttcatcaccataatcttgtggtatcagaagtgtttagtggagtttattcactacacatgcagttgttcttttgccatgaccgccattcattttctcgtcaaaacaaatctatgaagtttggttttcagactcatggttcttgtagctcttgtgaatttttttttcttctccttgcatgcattcttcaaattacatattgcatataccaggtgctctcctttattttatatttaatttttaaaattctatcatatattttttaatgtcaaacctcaaactaggggttcactgcatcttaggcttaccaggctaatatttctttacttaaccttttccctttatatttgctatcctcttgtgtagtaatcaccataagaagggtacaaactaaattaccctcccattcttttgtatcattctgaaatagtgtcacagagctttgatttttttgccctcatttaatctggcaaatgttctctctatttttttttttttactttcttttgacgggattctcaggcaattgttacggggagcagccagtcacactgtttctgtttattatgcaggtgagttacctgcccctctctgttatgattactgcgtttaagaagaccagcgttacaagacctcttgagggcttcggagttcttatcccttcgaatgagcaacataatggactgaagactctcggtaattgtctggttcacgtgtgtagcgaatcagattttcaaaccctgatttcgtaacattgcaggtactctgttttcatctatgatgtttccagatcgtgctttctccgatatgtatctctatactaccatggttggaggaagcagaaatagagaacttgcaaaagcttcaacgtatgagatatgcaatgttttaaatgtatgctatagtcatcgtttcaaccttttggtgcctttttcttactaatttatcctcctggtttaatgatcttagggatgaattggagcaaatagtttcgtctgatctccaccagctgttgggcactgagggaaaacctacttttgtgaagtattgatatctttcacccaacttaacatgatttgtgcttataatatgttaaataaagtaactgaaatcctgaaattaagactacgaaactgtatggtgacagtcatttttactggaacaatgcattccctttatatgggcacaattacgactcagttctgagagcaatagaaaagatggaaagagatcttcctggacttttttacgcaggtaatctgtcatttgcttgttgcgataaagttcatgtacagttggcatatcaatcaacttgcattctttcttgctaactccaaacaatcaggatcattaacttgtaggctgcagcaacagagagtatctcccaagttgttaggtttcatgtaacctcgtcgctgagatgaaatttccgttggctaaaaagtgaaagttttgtattgatgttacccaaaacaaaagtattttgcatgttgcttgaagttttggttgtttcagatagtacatcctttgacatgaaaataaatggaaaagcgtatgtcaagcaattatcatctagtttctttgtttctagatactagccgcatttgatcccagatcatttttgaggaagtcagctgaaataccgtagctatccttcagttttcataataaaactttaatggatctgatgtacagtaatttagtgtgcaccgggttaataattgatattaacttcatatagtgagtcttataaagatataatgaacttatatacaatatagtggattttattaatggaaaacatatagtgaaactatatgcaatatagtatgatacataaagacttagacaacaagagcattcgaaattacaaagaacaaaggaaagaacaattgtatcaaaccggttcgaatgaacaaacaaccaccacttccacaatcaatgtaccaccaatcaagactaaactataacaatgagcttctagtttaagtctactttgagttttaatcaccaattcaacgattagatgatcaaaattgcaaaggttaagagttggtcaaacctaaccaagagttacactaggcacatagctttgttaggagtatattagtttatgaattctagttaagttagaaatccaatacctagttggattaggattcctaattggattagaattatagtttagttagaattctagtaatagtaggcgtgtgattaggagatataattagcttaattcttatattgttagtttaattcttatcctcgttttaggtttatctttagtcgaacttgtaccctatataaggggcctttatttcattaataatatagtttattttgagtttaaacctttacttgtgattgtttgcttgagaggttattaatcgaaccattaataacttttcaggattgttaagtttttagtgttaaacatcttaatttcaggagtgattttaagagtgtttagattcttgtattcaagtttcaggactgatcttgaatcaagaaatatccctagtttcgactaatatcataagtagttcgaattcttggagtcttttcttcaagattcatattcataacttgattatttagacttcttggttttgtaatcatatcaagtggtatcagttttccagggaggagaggatacaaagggttctctttgatcaaagaagatccaagggcatcaataagaatgacacttgcaataagttcgagtgatacaaacaacttcaagactcgatcttttgctaccaagaaccaatcttgacgcctgaagattgttaggacaaaggataagaagtgtttctacatccaagattgcattctttacgtccaagattgcgtcaagatccattctttaagttcaagaaaggagtagaaagcattcgaacactacttaaacatgacatccgagatggataagctggctatggccatgagtgccttggcacaatcacaaactgagtcacgcaaccacatgggtaggatggaggcacgtgaccgtggattgaaactagatgactatagtggagatggcaatccagaagacttgttggagtggatttgccaactaggcaaagtgagtgattataggggctttgatcacaagaagagattcaaggttgcttccattaggctcacgaagtatgctggaatacggctcgaaggattgcatgcacaaacttcttgcctaatgactatgaacaaaaacagttcataaggctcgcatcaataagccaaaacacacttagtgtacacgaatacagcatggagtttgacaaattagggcttatatgtgacatagaagagaaagagcaatacaagattgcaatgtacattaaagggttgaatcgatatatagccaagaagatcgaagtctcaacttatcacttctttgaggatgtgactaaattggctaagaaattcgaagagcatgacaaagaagaagggcctaagagttcttacacacctaagtatgactctagtgctaaagggaaatcaacagttccctactcaaggtggtcggaaagacctaagaaccccactacacctaaggaggacactagcatggagaagacaaaagtggccgtacctaaggagagtttaattttgtgttttatacatctttgcttaagagcttaacaattgaaactattaataacttttcaggatggttaagtttttagtgttaaacatcttaatttcaggagtgattttaagagtatttagattcttgtattcaagtttcaggagtgatcttgaatcaagaaatatccccttgttcaactattataattgatcttattcgagttcttggagttaatttcttcaagattcatattcatacttgattattagacttcttggtttagtaatcatatcaatatcattagcattaatttacccccagggagattaagaaaggattagcctaatcaaggcgcttaagaagtttttaggaaaaatcgtgcttgttaagcttaagaattgaacttctttcaccatttgcccttgattctcttgttgaactagaagatcttggttcatagtagatgctcctgcatcatagtagagcatttaattttaattttttaacatgcacgaagatgtaggtagtgtagtatatatcgtgagacgtggtttaacatatagaaagatgtagtttctgcatgatatagtgagtttttgcatgatatagtgaatgtctgaatgatacagtggatcgttccgaattgttgtagtttgtatgatatagtatttttgtgaatgatatagtgagtttcttcatgatacaatgggtttctgaatgatatagtggattgcttagaaatgatatagtgagcttttgtatcatgtagtaggtttctatgtgatataggttgttaaaagatgatacatgcttttggcctcatgtactctaatgttaacgtgaacccggtccttgcaagtcaattgcagttttttcaatattaagctatttttttttttttttttttttttttttttttttttttgtacgggaatatttagcatctttaccacaaacataaccatacgaatattatgcggaaattccagtctgaagtcttaacttttcaaaattaaaagcttctatattatttttggaatgaaaaaaaatgagctatggcatgttattttgaaatacaatgagtctcaaggtgcatagtggcttcaattctacgaataatgaatggactactgatttctaattttttgttccgggcttttgcattaggtaaccataaagatggactctctgtgggaagaactatttcctctggatacaaagctgcggagcttgtgatatcctatctcaactctacttaagatgcctaaatgatcgaggagactccgtaagtcctttctctgattctatctttgaactgagtggaaacacgactgtggtctaaagtagttgatgtctcagatatccagaaatggcgttagtgatattcaggagctgtccattgaccctttgattcattgttgcagtttactgaaagttgttagctggtctcagaaaaacgaaaggaaaaaagggggaaaacaaaaacaaagaaacgtagattgtggtgttaaaatcaagaattccagagatttgtaccttctttatcagttgaattgtttacagtgtgaatcaagaagttagctcgaccttcttttcttgtgaatggtaagatttcgtgatcatcaatacttgattgtgctgtttgcaacttcaacggtaagatttcctgatcttacagtttaattgcttgtgctgtttgccactt

SEQ ID NO: 26 - DNA, 1575 bp, synthetic construct
  misc_feature 1..1575: note = F420M mutated Beta vulgaris PPO2
  source 1..1575: mol_type = other DNA
atggtaatgctatacgattctcacctctcaggagtctcaactcatcttcaactatcgcaggcatttcccaggaagaacccattaatggccaaagtgtctgagccgggtaaacccacttctgctaaaaggattgctgttgttggtgctggtgttagtggacttgctgccgcatataagctaaagtcccatggcttgagtgtgacattgtttgaagctgatactagagctggaggaaaactcaaaactgttgcaaaggatggtttgatttgggatgagggggcaaatactatgatagagagtgaagcggaggtcacgagtttactcgatgatcttgggcttcgtgagaagcagcagtttccaattgcacaaaacaaaagatacattgcgagagacggtcgtcctgtgctgataccttcgagtcccattgcacttctcaagagcaatatcctttcagcgcaatctaagctacaacttatgttggagccattcctttggagaaaacgctatgcttctaagatttctgatgagcatgctcaggaaagtgtgggtgagttttttgagcgacattttgggaaagagtttgttgattatctaattgatccttttgtcgcgggtacaagtggaggagatcctcagtctctttctatgcgtcatgcatttccagaagtatggaatattgagaacaagtttggctcactaatttccggattaattcaatctaaactgtctccaaagaaggaaaagggtggaggaggaaagccttcttctaatgaaaagacacgcatacgtggttcgttttctttccagggtggaatgcagacacttgttgacacaatatgcaatcagtttggtaaagatgaactcaaactacagtgcaaggtcctttcattgtcctacagtcataaggggatcccttcttcagaaaattgggtcgtgtcttctgtgtcaaaaaattccattgaagatcaacaatatgatgctgtcatcgttaccgctccaatcagcaatattaaagaactgaagattctgaaagctggagttccattttcacttgacttcattccagaggtgagttacctgcccctctctgttatgattactgcgtttaagaagaccagcgttacaagacctcttgagggcttcggagttcttatcccttcgaatgagcaacataatggactgaagactctcggtactctgttttcatctatgatgtttccagatcgtgctttctccgatatgtatctctatactaccatggttggaggaagcagaaatagagaacttgcaaaagcttcaacggatgaattggagcaaatagtttcgtctgatctccaccagctgttgggcactgagggaaaacctacttttgtgaatcatttttactggaacaatgcattccctttatatgggcacaattacgactcagttctgagagcaatagaaaagatggaaagagatcttcctggacttttttacgcaggtaaccataaagatggactctctgtgggaagaactatttcctctggatacaaagctgcggagcttgtgatatcctatctcaactctacttaa

SEQ ID NO: 27 - protein, 524 aa, synthetic construct
  REGION 1..524: note = F420M mutant protein of Beta vulgaris PPO2
MVMLYDSHLSGVSTHLQLSQAFPRKNPLMAKVSEPGKPTSAKRIAVVGAGVSGLAAAYKLKSHGLSVTLFEADTRAGGKLKTVAKDGLIWDEGANTMIESEAEVTSLLDDLGLREKQQFPIAQNKRYIARDGRPVLIPSSPIALLKSNILSAQSKLQLMLEPFLWRKRYASKISDEHAQESVGEFFERHFGKEFVDYLIDPFVAGTSGGDPQSLSMRHAFPEVWNIENKFGSLISGLIQSKLSPKKEKGGGGKPSSNEKTRIRGSFSFQGGMQTLVDTICNQFGKDELKLQCKVLSLSYSHKGIPSSENWVVSSVSKNSIEDQQYDAVIVTAPISNIKELKILKAGVPFSLDFIPEVSYLPLSVMITAFKKTSVTRPLEGFGVLIPSNEQHNGLKTLGTLFSSMMFPDRAFSDMYLYTTMVGGSRNRELAKASTDELEQIVSSDLHQLLGTEGKPTFVNHFYWNNAFPLYGHNYDSVLRAIEKMERDLPGLFYAGNHKDGLSVGRTISSGYKAAELVISYLNST

SEQ ID NO: 28 - DNA, 37009 bp, synthetic construct
  misc_feature 1..37009: note = F420I mutated Beta vulgaris PPO2
  source 1..37009: mol_type = other DNA
tattccatcgaatgtagcaaattgactgtccgttgcaatttcggagtttccactcgtcgcatggtaaatggtaatgctatacgattctcacctctcaggagtctcaactcatcttcaactatcgcaggcatttcccaggaagaacccattaatggccaaagtgtctgagccgggtaaacccagtaagtcaaacattcgaatcacaactcaagcaaatttgtcttgtttgcgttatattttgctcatttcagccttttttgtttttccgacctttgcatactgaatattgtgtgtgtgtgtgtgtggggtttcagcttctgctaaaaggattgctgttgttggtgctggtgttaggtaaattttcgtctcttgcagagtttttgagtcatttgggaattctatgtgaaacttgtaactcccttcagtccaacgaacgcagtacaattttctatcaaatcatggtcctaatttccaattttccatatatattgttggaattatattgggattgtctatcactattaatagtattaggatcaattgtagagaagcacagaaatttttgggatcgaaagaatatctggattgccacattaacagcagatataattcttccaattggtttttggttcttcctaccttgacttgtctggtcaaacattataaactttaacctttaatatccattaaagtaaactataggatttttttgtctaaaacatgcttatataacatgaaatttgtgagaaaccaccttatatatatttttttgcgaaaacaaaccttaaacaaaattattatcgtgagaacaaaccttatgccaatttcgatcattgacccaaggttttggcattgaccgtgtcatgaattttgttgggtttaaaaagtcatgtgtcttgcatacgaaatggtaaatgcgggaaccttgggtcaatgtttggaatccgcataaggtttgttctcccaaaaaatgtttttgttcaaggtttgtttttgcaaaaaaacttatataaggtgctttctcagaaatttcatgttttataaagtagtatttgacaaaaaaccctaaaatatattatagaattattattgactaaattgtgtaaaaatgtactcttctaaaagtacattatagtattttagtggaacatttgcgagaaactactttataaatacgatttttgcgagaaatttcctaataaaaaaatgtgaagtgcaaaactatcttattgataattttctactccctcaaatccaaaatactatgaagtctttcctttctggtttgtcccagattagtttgtacgcttccatctttggtatgatcccacttttattatacttattagttttacgtgagttccttactctatctcttttaacaaaaatactcaactatctctatccaataaaaagttccttactagtcctatcacatctgctttttaataaaataacgtttgataaccacacaacttatatccttaaaatacacgttcaaccaagtgttgagattaatttggacggagggaataaatattttttgaggcatattggtagcagtattcggattccgataggttgactatgtttccaatgttgaccaacacttgccttgcatgtaattctaactttgctcttttttattcttcatttccctcgtattccatatacaatgtttagagacccattccttcctcttctcttctttcccttccttactatgctttgccataatcttcctcaaatgagtgcaaattaatttgtcgttgatgtaggccaactgattgtagcacatcttcatagttcatacctcaacacactcgtaattatattataccctacatgttaaatggctcatgaagctttattttatatcatacttcctccgtttcacaataagtgtaacacttttcttatttggaataatcacaataagtgaaaccaagctccaaatggtaagaaaagttcactcttattacaaatataccaccaaaaagtaagaggggatcacaacttcaatacttcttcactctactttattgtggtcccaactttctctctctaaattccttggtaactccccactttctctatgtttcacttatggtgaaatggaggaagtattttgtagtggtatttagctactaggccttggatgatatacaatcatacaatgtatttatattcacgataatttgctgcccaccttgattaccatgatttccaccaattttatcaatttcagtacttcaccaccccgaatttatattttttatttccaaccttggtatctccatttgtctgagtgcccgatccatttgtatcgcctccagaattgaagaagcttcctgcagctagacaattaggaaggttaaaaaagtttggagatggtggaggatagccataataatcattgttgggaggtggaacttggaaggttattgtagggttgaagtccttgatgaagaagaattgagttcaaatgagaggaaaaaggagcagggaagagggacaataagaaaaaaaagggtaaactaaaatcacgtgtaaggcatgtgcagatcaacatcagaaagcatagtcaacctactggtattagggcactgatacctttttgggtcaaaatttttttacaaggtatttcatgaggtagttttgtccatttttttttttacaaggtatcgtctcattttttttttatcatttagtttctcgcaataagtgtatttcatgaggtagttttttccaaaatttcctcatttattataaaatacctcatcttttccataaataatgcaatgtctagacttttacgctgtttacacatgctcctttgaccatctattgacacacaaggaaaaatagagtagagtcatgcaggatcttgttagatttttctcgatatatactttcaaaagatcaatttttttataattttttttttgaggggattttttttttataattatgtacttatcaaaggtcaaagttgtgcaccgggaagcataaaactctatgtgttgcaatttacatggaaggggaggagtataataagagaaaattatggtaaaaggttcattcctggagatcatgagaaaggaagtagaaagaacaaaaaagaacaatgggagtgcttttcaatgtttgttgtacgtagcatttattcatttgctataatgttttgtgacattgtagtggacttgctgccgcatataagctaaagtcccatggcttgagtgtgacattgtttgaagctgatactagagctggaggaaaactcaaaactgttgcaaaggatggtttgatttgggatgagggggcaaatactatggtaatgtttttgattattgcaggtcttgcactttagcgcacaattaatttctggatttttttttgtactgtggtggttatggtcatcaacatgtctcacccactgtgcttgcagatagagagtgaagcggaggtcacgagtttactcgatgatcttgggcttcgtgagaagcagcagtttgtaagtctttcattatctgaatggcacatactttatttcgaaagattgtaattgccttttctttctagatggcttcatcttcatgttgctttctgattcagtttcgtggctaactttccaagtttgtctgattgctaactctgtcatagccaattgcacaaaacaaaagatacattgcgagagacggtcgtcctgtgctggtaagtttgcttgttttacttttgacctcttttaagatctttcaactctggagcctggaaacatggtgatgcaggaggcaagttctctctattttacatcctttcttctctgtatcttatgacatttgcctcttattctgtgcagataccttcgagtcccattgcacttctcaagagcaatatcctttcagcgcaatctaaggtcgttttatgttaagacatacttgatgctgagagtttattgaattcttaaccttcttcttattttttttttatttttttagcaaaaggtaagtatattgcatttaccaaaaaacagtatgtacaccaccacagcagccatgtcagaatctagaaataccaccgaaaaaatcctacacccaaccagagacagttatattatatcctactcctaagtttctgtacccaatttacatcaatattggtccatttacaagatatttttataattcacagaagcacatcagttttaattagtttaataatgacctctggatgaataaccaactcagaccatatagccttattcctggctttccggaagttgtacgccagagcagcaagcacagcaatgcaaacctgtttcttatacctccttttatgtgtcttagcccatctcttatagctagtgaagatacagtcgtgtgcacaggattgaaccccaatccaactagcgaaagcctcacaacattatgactataaatacatctgaagtataaatgctgcacctttttctcctcttgcctgcacggtatcagaacaaatcccagctttagctaacaattccctggttttcagtttattcaatgccatcatgcaagcaatgaaagaatgttttggaacattcagtttgttccaaacacagtgagagcaagggacctttcctgcagttccacttagccacttatatccctgactaatagtatgactctttgcaccgtaaattgatttcaacttaactttttcataagcagtgaattgtgtgttgttagagtgtctagctgtctaggagattgggagaaaaggagggaccaaggagatagaaacacacctttgtgtttctttgtgtatttactttttagggtgggtcacgttttctgagaaatttgggaaaaggaagaaatagtaacacactttcccatttgtataacctgtatactggagctccaatataatttgcatttttttttgagctgcaagaatatgttgacaaacagttattgcttcttcctcagctacaacttatgttggagccattcctttggagaaaacgctatgcttctaagatttctgatgagcatgctcaggaaaggtaatgtcaagacatgtgttacctcgccttaattttcgttccaggaggtgagcatgcatttagaactaaaaggcacaaagactgttggtggtcttgcctgttcaaatataatggagaggagttttcgctacatttaccctctcttgaagtggggttgaaatatagcatcaagttgaatgcttgattaagtttaaaggacttgtgtaactctttttctgtttactgtgattacatgacctggttgattaacataatggtctgtttatctgtagtgtgggtgagttttttgagcgacattttgggaaagaggtaatggtttaccatagtatttctgctttagtggtaaattgtaatgttgctgataattatacttcgctgcagtttgttgattatctaattgatccttttgtcgcgggtacaagtggaggagatcctcagtctctttctgtaagtgaacattttgtgcttcactcccaattttttggaggctggaaatagattcttttccagttgttctgtcaaaaatagatgtagctttattttgaatttgaagttcccaattgttcattttgactattactgattattgctaagagtggcattatgctattatgctcctaaaagaaaggtgaattttgacctacatatagtataatgtatcaatattggtttaattgtttgttcttttgttccttttggtgctcatcttgcgccttgttctcatcgctcgttttttcatgttgcacttgatttaaatttgctcagcttaacttgtctttttgaatttatattacttattgctatattttactaatttcgttgaaactaattttttgctgaacttttcgttttgttgaaatcatttttctgaattaacttgattttcctgaatagaattgaattttggtgatcttaccttttctgcagccttttatttctttcttgtcctttttccaatctcatttttttatatttccattgtgttgacatcttatcattaactgtgcagatgcgtcatgcatttccagaagtatggaatattgagaacaagtatggaccataagacgtttattttaatcgacatgtatgtttcttagtttatacatatattaattctgtggtaaaaaaaccgaacaagaatatctttttttttttctatcatcaaaaagggtgaatatatgtagaggaaaaagatttgaatcaagatattagcctaaagcaataataatgttagtaatagctttaataacaaattcaaaacgtacattaatgaaccgagaggccggaaaatagttaaagtgaccactaagagaagcgaaggattcatgatgggttttcaacccagtagggcaaatttgttcaatgttctttacaaatcaagcttattaccttgtgggtgtttttgctagagatgaatgatagaattttccctagttggaagtcttttttggttactttatgggagctagtgatgtaatttgtttcgccttatggcatttcctaacatgtgcttttgtgatgtattgaagctttttttttgccttaatttatgctggattttaattttgttctttgtttcatttttcttgcttttgaaaaaaatatatagatatgtatatattaggattggtcgaggattttgagggaagggaaagacctaagaaaacttggatgagggtgattgatagtgatatgagtctatttgggatcgaagaaaatattcctttggataaggtgtagtggagggttgagggagcaaatttatgcagattagcttgacttaaagtttttctttttgattatttttcatttacttgtgttttgcaaacatttactcatgaatgatgtaaacttcttcaaccaaatctctggaaaaaaataatctacatggaaaaaacattattaatgttaacttgacagagatcccatccttgtgaagcagctagcaattaggcatctaacaattgacattttaatggacaggatagaatgtctcttgatagtcaataccctctgtttcattgtatcccatagctactaatctagtttgtatctttccaaagaaccattattttgaagtttcaccttgaacacccattttgaaccaatatgtttcttgcccttggggagaggggctaattgccatgttttgatgcggatgcaaagacacttgttctacctgagcctattgacttgatcatggatactctagggtttgaactcaagggaaagaatcaagtcttggcatgtgtggtgacatggcgtggggatggagtaaagaagagtcatagttctgttaggatatgttcttgcttgctacatagaatcgtagttctgttaggattgctatgatattatatctagtagatagattttatagttaattaggataaacatgtgatgatcatgttataataggcatgtgattagaggataggattagcttaattcttatcttgttgttagtttaattcttatcctagttttatgtttatcttagtcgaagttgtagccatataaagggcgttccattcattaataatacttagttttgctttgtgttttaaacatacttcttgattattgtttgcttgtgagctaactaatcaaaccattaaagacttttcaggagttttagtgctaaacatcttaatttcaggagtgattttaagagcgtttagtgatcttgaatcaagaaatatccttgttcttgttcgactaatatcagtggttttgttcgagttcttggagttaatctcttcaagattcttattcaacttgattgttgagcttattggtttagtaatcatatcaagtggtatcagttttccagggaggagaggatagataggattctctttgatcaacaaagatccaagggctatcaacaaggttcaaacattgctgcttgttcaagacttgatctttttctaccaagatgcattctttacgtcacaaggtagtaataacaagattaagagtggtttttacatccaagaatcaatctttcacgtccaagatttcatctttcacgtctaagattcattctttaagatcaagaaagttataacaagcatagaagaacacataaccatggagtccgagatggacaagcttgccaaagctatgcaagcacttgcaaagtcgcaaactgaatcacagagtcgactcaatgagaatactaccacaatcaatgggattggtagtaacatgaataggttggaggcacgcatggatgccattgcaaccatcatacaaaagaagcttgatcggaatagtgccaacttcataggtgccaattcagaggaagagttggcagaacgtgaagaaagatcatccaagactacatacaatgatgatcgtggcttaaagttggatgactataatggagatagcaatcgagaagacttgttacagtggattcgacaacttgagaaggtatgtgattatagaggctttgatgacaagaaaagattcaggattgcctccataagactcacgaaatatgctggaatttggcttgaaagcttcaaggcacaacgagccaagaaaggtaaagaaaagttgtgtagttggacaaagttgaaagttcaagcttaaagagaagttcttgcctagtgactatgaacaaaaatagttcataagactctctactataagccaagacacgcttagtgtacatgagtacaccatggaatttgacaagctagggcttatatttgacatagaggagaaagaacaatggaagattgcaagatacatcaaaggcttgaaccgccacattgccaagaaggtggaagtatccacttatcacacctttgaggatgtgacaaagttggctaagaagtttgaagaacatgagaaggaagagaagcctaagagttcttacacgcctaagtatgatactaatgctaaggccaaggctagcttcctactcaaagtggtatgaaggacctaagaggctaagaacctcaccccacctaaagaagacacaagagttgagaagcctaaagtcgtcgttccaaaggagaaatttgaagagatgagaaagtgcttcaagtgtcaaggaaggagacacatagcaagcaattgtcctaacaaaagagtcctcaccatgagacaatacctagctttgcaagaagaggaggatgtctattagttcgtccctgatgaagagcaaacttaggggaagaagaggaggaggatgcttttgctgaggatgatgcaaggctagtaggggtcaagaggcgcaccttacatgtcgaccatacacctagcatggagcaaatggaaaaatcttttccacactagatgcaaggtaggtgactatatatgtaatggtataatagatagtggttcttgcactaatgttattgtatctgaggtagtgtcaaagctaaacttagctacaagggcacaccctaagccatacaagttgagtttgctagatgatagcactggcatgagagtaaagaaacaagctttgatttcattctctataggggttataaggatgagttatggggtgatgtattgcctatgagtgcatgtcatctcttgcttggaagaccattgcagtttgataaaaaggtcatccatgagggggactctaatgtgtactctgtgttggttggttctaagagggtatgtttgcatcccttagctcctcattcagtggcgccaaagcaaccacctaagacaccaagttactttctatcttcaagggagttcgaacaagaggtggaggaagaaggttgtgcttatgccttgattgtaagacatgctgccacaagtgtcaagactactagcaatgagaagctcgaagccttgatgaaagagtttgaggatgtctttctagaggaactacgacccttgagaggcatagaacatgctgtagaccttgtacctggcgcccctttgcctaacaagcctgcttataagtgtgatccagtggcatctagggaattgcaacgccaaattgaggacctaattgaaaagggctatttaagggagatcatgagtccatgtgttgtgccagctttactagttcctaagaaagatgacacatggaggatgtgcatagatagtagagcagtgaacaacattacagtcaagtaaaggtttcctatgcctagattggaagatatgttggataagttacatggggcatcaatcttttctaagattgatcttcgaagtggctaccaccaaatgaggatcagagaaggtgatgagtggaaaacaacattcaagaccaagcagggattgtatgagtggatggtgatgccatttgccttatgcaatgcgccaagctctttcatgagcttgatgaatgaggtacttcgtccgttccttaacaagtttgtggttgtttacatagatgatatacatatctatagccaaaatgtggaggaacacttgttgaacttgcgtagcttattcatgaagcttagagagcaccaactctatggtaagattgatggcgacgaggttgacgggggattatggcggcagtgaatcaccctctttgccggtcactgaaatacaacctgaggtatctttaaattctgtaattggattgactaacccaaaaactatgaaattgctgggaaaaattgctggatgtgaagttgtggtgatgattgaccctggggcaacccataattttttatcactagctactgttgagaaattagctattcctgtgtcggaatcggaaggatttggggtttctctaggggatggacaggcggtgaggggtagtggaatttgtagaggggtgttattgagtttaaatggtggagttgaagtggaaacagattttcagcctctgggtcttggtaattcggacgtgattttgggtgtacagtggctggagacgttggggacagtggagagcaattggaaaacacaaacaatggggtttgaaatcgagggtgtcaagttcactttgaaggtgacccatcactggcgaggtctcgaatctcactcaaagccatgatacgtaccttatgtaaagagggtggaggtttgtggcttgagttgaaccagattgagcattatcaggagaaaacaccgcattcatcagccttacctgaaattccagttttcttacagagagtccttacccaatttcagtctgtgtttgctacaccagaaggcttaccaccgataagagaacatgaacatgcaatagttcttagagaagggtgtaatccggtaggggtaataccgtaccgttatccacagttccaaaaagatgagatagagcgcctcatcaaagaaatgttggcttccggaatcatcaatccttccacgagccctttctcgagcccggtgatattagtgaagaagaaagatgggtcgtggcggttttgtgtagactatcgggccctcaataaagaaacggtccccgataagtatcccattcccgtgattgatgaattgttggatgagcttcatggggcaacacttttttcaaaactcgacttaagggccgggtatcaccagatccgggttaaggccgaagacactctcaaaacagcttttcgcactcatgaggggcattacgagtttttagtaatgccatttgggttgacaaacgcgccggcaacgtttcaatcccttatgaacgaggtcttcaaaccattcttgcgcaagtttgtcttggtatttttcgacgatatattggtctacagtagttctgccaggaacatgaggagcatttgaccttggtgttgcacaccctagcagctcataaattgtttgtgaatcagaagaaatgtgattttggcaggtcggaagtagcatatatggggcatatcatctctggtcaaggggtggctgtggatatggagaaggttcaagcgatggtggaatggccccttcctaaaaacctccgggaattacggggatttttgggccttacagggtactaccgcaaattcgtacttcactatgctcatatagccaagcctttaactgatcaactcaagagagatgcgtttgggtggtctgaggcagcaactcaagcctttgaaaagctcaagaaggcgatgatcacatcccctgttttggcaatgccggacttccaagagttgtttgtggttgagaccgacgcatccgggtatggtctgggggcagtgttaatgcaaaacaaccgacccattgccttttacagtaagttgttaggtgcccgggctcaattaaagtcgatctacgaaatggagttgatggccatctgcatggcagttcagaattggagatattatctgctgggtcgacatttcctcattcgtacagaccaacagagtttacgtcatctcactcagcagcgagaagtaagtactgccttccaacgttggatgagtaaacttatggggttcgattttgaaatacagtttaagccggggtgtgccaaccgggtagctgatgcattatcccgcaagacagtgggagaggttgaattgggtgcgctgatattaactcatggggtggactggaccgacttggagcgtgaaattgaaggcgatcctctgttgtgcaaaattaaacaagacttccacgggggtgctattactcctgtgcacttttctttggtggacaacaagctgttgttcaagggtcgatacgtgattcccagctcttcggtttttattcctaccttgctgcgagaatatcacgattctcccattggagggcattcgggggacctcaaaacatatctcaggatggctgccgactggtattggaggggcatgcgcaaggatgtggcgcggtatgtgcaacattgtagcgtgtgtcaacaacaaaaaatgtctcaacagatgccagggggggtactacaaccactccccataccttcctcggtttgggatgacttgtcaatggacttcgtggaaggcttgccatcttccaagggggtaaacaccatcctcgtggtggtcgatcgtttgtctaagtacgcccacttcctcccactacgtcatccatttactgctgtgtcggtggcaaatgtgtttgtcaaagaggtggttcgtttgcatgggtttccttcctccattgtttcagatcgggatcgaatttttatgagtgtgttttggcgggaattatttcgtttacatgacaccacactcaaacgaagtaccgcgtatcatcctcaaacggatggtcagtccgaaatcgtcaatcgagctctggagacttatttgcgttgctttgtgggggaatacccgcgctcttgggctcagtggcttgggccgaattttcatataatacttctcctcatctctctaccaaaatgaccccgtcaaggtcctttatggtagagaccctcctactgtgatacgggttaatcggggagcctcacctgttgaaagcttggaaaacatgctccaagagcgagacgcagtattagatgccttgcagattaatctgattaaagctcaacagaaaatgaagagtagtgctgatgctacaagaagagaggtgcattttaaggtgggagatcgagtgtacttaaaattacagccttaccgtcagaaatctttggcttaacgcccttatgagaagttagccgcccgtttctacggaccatttactattttacagaagattgggcaagctgcatacaagttacaacttcctgtttctagcaaggtgcatccggtgtttcatgtctcccaactgaaacaggccgttggttccattcccgtttcagccactattccagagcaattgtcttctgacttggagttagaggtggaacctgatgaactcctcgatgttcgtagtgtttctagaggccagcacacttacttggaagctctcattcagtggcagggattaccatcattcgaagctacctgggaagatgtggctgctttccatcaccattttccatccttccaccttgaggacaaggtgaaactttgggggggtggtaatgtgatgcaccaaactaccactccactactcacctattagaggcgtaagaaaaagggggtaaatcaggaatagtttacaaattctgttgaaaggaatattttgtaattatgatgtcagaggttgttagcaaaaaggcagtagagtaacaataaaaaggggaagggaggagagaagaaggtattgagatttttgtaaggaacttggcccttgggagagttgggagcctctcgaaagctcaccattatcttgtgaatattttccttcctggttatatacaagaaccttcctctgtcaatttcttttctctctaatcttatttcttattctgttttctggttgccattgtttgaagttgcttgttgtgcttgagtaaatacgtgaagtggtgaaacccatctgaattcatcacatctattccaagtggtataatacaagcttgtaatccaaatctaatgagaaatctaagttatgaagaatttcaaaagaactaagtacccttgttttggatgcccaaggatttacttgccgctcaagttaatgctcaacgtgcaagatacaacctctttagtatcccaaggtagtttccataagaattaattgagctcaaatcaagaacaatatttttatgtattaatgtgaacacttcctgaattatattagatatatggtctgaaggttggaagaaagattagcttttaattttaagtttgagatagtttttagaatcgaggaaagattagctcttaacttgtaaactaaggattgctttataagtaaaacattagttatggaactcttaaaattggttttgaacatttctagttaaaaatcccatgtaattctcccaaactagcttaaaatctcacatttcacaagctaaggagagacaaatggcgttctcttgtgaaacaatctaaaattttcattaggctactgttttcaagtatttatatgttagaagtgccgcatataggtacataaaataagtttacaaacacaagtaggaataaggaaaactaaaagagaaacttcagccatacaaaaccggctgaaatcagctactactttctactttctagcttcaaaatctgattgcaagtctcctttaagccaatcaccaatgaaaacctttcctccacatgaagtgtgctcaaatcaagagaagaaacccatcattcgcctatagctacctgggtcagatgaagatacggcaaaaaaaacgctggaaatcagtgaaccaaaataagcaccaattggatgctttctgtccttgctacattttcttctcataggactacttcaagccatacatgaataagcagttagatccagctcctagcatccatttgatcgtacaaatgagctccaaaaagataagtaaaaccaagcagccaaaacctaattaatactaatgatgaattagttgaatagctaatgacgatgaagcaacactttagtaggaatagtgttaattatgatcaatgctacttaatcttctgattaatttttggaaaaatgtcatatctaccttctgtatacacttattcataactatatcgtattattattatttttaaataactaccttttaagtaccaaaacctaagaaatcaggcacttgatggattccatccaaagatccatttggcggggcccactaactgacttttgattttttgcctttcctcttttggttaatctcaatggttcatcaataacaactcaatcttctccccatttcatcaaatcatccctaaatcagaactttttcaaattcacccaaatgaggttatggaaacctctaccaagtttattcgaccacttttagtctagctcaaagttttacacttgcttcaaaaactaagatttattaactttagaaattaggtttttatttttattttttatttaactttgtaacaatcttaaataactcaggtgctttctagagtttggctttaattgtttttcccttggttatgtgaaagaagtatgactactttctccaagactaaagtagagagcaaaaaatgcaattctggaatttcttgcaaaagaaaaggaacgagttaatgataatgaaaaacaaagaaaatgatgagaagagaggagctgaatcaatcatgatcatgtattttaaagttttttttgctattgaagtgacttaagaagaggaaagaggatgagtgaagacaaacaaaagaaaggataaatagagggaaatcttgggcttagaaaggtgaaaaggtaagaagatgagttagtgggccccaacaaatgtatctttggatataatccgtcatgccactgtttggggcttgcttaagtccatacattacttcactaattttacaaaatttattttcttgaccaagaactgaaaaaaccttcagtggtgatctattaggttttggaagttaaaaggtagttatttaaatgtttttaatataaaaggtagttatttagatatttttaatataaaaggtagttatgtgaataaaagtgtatataaaatgtaattttttgacatttttgccttagtttttcttgctaattcaccttttcaacttgaccaagttgctatgaggagaaaacgagcaattattaagcaaatcgcaacactagcattaatccatggcccatgaaactctccataattagagattggattagcacttagtagaacttcttgctcctgctccaggtttccattacttctttatctaagtgcatcaaaaggttgttgggttatgaaaggtggtggttgtgtatagtcattgtcaaaatgttgttaatgcactctatttagaggatgagggattgaatagttttcacctcgtgacctttcattcctttttaaaaaaattgataatgtgtattggtcctatgactgtatgaatggtaataagctatctcatgagctgttactatcttcctcagagtctaggtagaagggtttgggctgataattttctactatgtgcaattagtttgttggatttggatatgctagttgatataggtcctttcccttgggccttctcttaatataggcctacagtgtgattgaagataaatcttctggagaatataagaacaatgagatggattggttagaggttgatttgttcttttggtgtaagactatttcgggttctctattggttatgttcagacgccagaatatgtgttggtgattgttttccatgaacatactttatccgcagagacatttttcttttttcttcctataagattatatttgtttcctctcttggtgctcatctcagtgtctctactttacgttaaactgttgacattacttgacaatgcgtatatttgtcgcatggtgctcttccctcactccacgtcgaccccatacatcaaaaaatgccattaaagaatattcgaactcacaaccttgtgttgaaagaatggaatccctaccaatgactcattaattcattttctctttaagaaataaatgatttcctcacaaacttttaggctttaagagcccaaaagataaaaacataaaataagatagacatcaacgtcaagattagccttaaatgcacaaagcacatgtcaaatgattgataactactcacgagttgcaactctttgggcgttgcctaatattaattggatctcttttaaaaattgttggtggttatggttggtggagaggaccatgtaacttttagctggtcacaactggtaatgattgtcacttttactgcccataaaaaaatttaaactgttgaatatgtttctggcagtggatctgacaaatcctttacaagttggcgtccattttgttttgccatgtgactcaattataatacgtgagttttattatccaccaggtttggctcactaatttccggattaattcaatctaaactgtctccaaagaaggaaaagggtggaggaggaaagccttcttctaatgaaaagacacgcatacgtggttcgttttctttccagggtggaatgcaggtattagcatgtagctttcattctgttaacatttgtggttcttccagacatacatccaatgctttttttttttcttgctataaccataaacattcttgtcatgaacattctttaatactgttgctgagcttagtgtattcgttcattcatgtaatttcctctcttgaggttaaaatggcatacagccttacaacctatatccataatgctccttagagtagaatccctaggttataacatagtaccacttatcaaaataaacatggcacacactgcaggacaagaagtaaatccacctagagaactgagcacctagtagtaaaagcagcgatacattactaataacagtagcagggccataagagtagtaaatgggcctcatttcaacactccccccgtaatggtgagagagaagaagcagtctgaactcccagcttggagagcaaaatagagtgttgctgaacagggagaaccttagtgaaaacatctggcacttgatcttgagatggaacataggtaggctgaataaccccttcttcatttgtattgtccctcaggaaatgacaatctatgtctacatgcttggttttctcatgatgaactagatatgctgctatggcaagagcagcttggttatcacagtagataggagtagcactggactttttaatgcgaagatctttgaggagttgtttgatccacatcacctcacacacagcaagagccatggatctgtactctgcactgaccacaagaaattgcctctttgactttcaagatacggggggagtcaccaaggagcacacaaaaccagatgtagaatttacaacacccatcccattcactatcacaaaatgctgttagttgagcactagacttgttcgccatgagaattcaccctgttggcagcttgaagatgcacattagtggggcagtgcataaatttgcttaaatcatgtatagtgaaggcaatatcaggcattgccttgtaatagtgagataaatgagcttccccatcaatttttgatacacatcaggttgttgaagaggatcaccattgtcagcatagagcttgacatgtgagtccatacgaagcctcaatcgtctgcaatttataaaaccatattcatcaacaagacccatcacatacttctttagagataaaaacgatacttcactacactgatccacttcaatcctcaaaaaatatcttaggccacccatatctttcatgtgaaattggccagcgaagaaactctttgcttcctcaatagttgctaaactattgccagcaagaatgaggtcgtccacatacaccaatatagcactgaaacagtgagagttttgcttgaagaatagagagtagtcacacttggattaagtgaatacattttgctttaaagcagtgttagcttggcaaaccattgcctcaaagcctacttcaagccataaagtgacttaagcagcttgcacaccttagttcatttggtgtcacttctgccatcagtacttagctccccctctccttgaactttgatcctgttacatgtttcactatatcctggtgatagcttcatgtatacactatcctacaattcaccatgcaaaaaagcatttttaacatccatttgtttgcaagaaccaaccctctaaggatgcaacaacaagcatgtggtcatctttgctacaggggtaaaagtctgctcataatctattccatatctctgtctgtcacccatgattacaagccttggcttatgcctattatttgtgccatcagtgctgtattttgttctgatccatccatgtgagggatggctcatttctacaaaatcctagttccgttaggatttgtgttgttttcctaattctagtaggaataggactcctaaaatcctaatcctcctagttctgttaggagtttaaaagttttagtttgattgtaattctagttgtgttagaaatccaaatcctagattcatgtcacgtatggttagaacatggctagtaggataatttgtcttgtgatgtccatagccttggcatttgtggcacctaactttcaatagcttgtcttctgtctccttttctttctccttctttgaggaatcaacgtttttagagctatctaaaccactagcatcaatattaggtttaaaagtgctaaaagatttcgaatagttcttacttgcatacaatttctttttctagtttatgtagcgtcaccagggaacaaaaactcggccgttccgttctggaacggccgctttgtaacggatttcagagaggccgttccgttaaataccgttctagaacggtgatttggaattcacaccaaactcggcgcgatagcgttacgtaacggtgtaacggcgttccagaaccgttacaatcacataacgtccgttatttgaagaagaccagttcttttggtggaggaagaagaagagccaacgcaagatctatagatctgagttaaaatttgaaaataaaacatgtttttttatttaaattaaagcttacagaggatgtagaactcaaattcgagtaaacccctcctttaatttcattaggttactgcaaatcgaaccctaaattgcaaaccctaatttcgaaaaaaccctaatatgcattgggatgcaacgctgcttctccggtcatggcagagaaggtcgacgagtcatcttcggctgcttttagcactgtagctgccggtggttggcttgtttgcaggttagtgcttgctggttttctttctctcataccgatcatcttcttcttttctctcttctctttttcttttttattgtgtgactgccagtcacgtgataattgcaactcataaagtatctctttctctctcttcttttcatccctttttatttttctttcccttttagtttttattccctcacgtggaatcacctaattttcatccttttttatttttttagttacactcttacacagaagtatgttcaaatatcattatagtacctcaaatattgtatttataagagttttggacataatatgatatagaaagtaaaatagaagaaaaataaagtttaaatgtcacttgtgtgatttttttaaaaaaattcacgccgcgacggccgcgaaacgttctatttcccgttacaagccgttcccgcgataacgcgaccgttcccgcgaacgcgaccgcgaccgcgttttttttccttgagcgtcacatcttgcaagcttcttcaaaggtgagttatgtgtacaactccaatttctctccaatcccctccgtcctcatttaggcctccaaggaagctacttaaacattgatcttcaagttcatcaattttccaaagaatggataacttctcgaactcctttatgtaatcttcaacggacatattcccttgtttaagagtagaccattccatgtacaagctttgtttgtagttagaaggaacaaaacgtcctcttaacaactttttaagcttatcccaagtagagattttgggtttattagctttcacacgctgcctctttactccatccaaccaaatagatgcatatttggttaccttaagcacggccaccttgtatttcttttcttttggtgtctcttaatcccaagtagagcttttgcgtgtgaaagctaataaacacaaaatctctacttgggataatcttcttcttgtttccgaaacaactaattcttatggtagttaggaaagcaagaatggtttctaattcaatagggaatatattaattattattagtttaagttaaatagtgcacgaatctaaatagattattcgtctcaaaatctcacttaagtatagatttgtttggacatctgagggaagaagaagagagcgagataaaggagaattatcactcaatgaatccatatcccgagttttcccatttacttctttgaaagcaatatagttcacgaggtcttattatcagtctatggacataagagtaataatttaagggcaaaaactatgactttatgggtttaaactgatacatgttctgttaaactgatagatgttctgtgttaaaccgatactcatatattcctggttaaactgatagatatatgatttaaattgatacccgtctcagtcatgtcttggattgagacggtctgacacaagactttttgtgtattatatatctgattagaataaatttatcctgtttactaattattttatcttctccagacacttgttgacacaatatgcaatcagtttggtaaagatgaactcaaactacagtgcaaggtcctttcattgtcctacagtcataaggggatcccttcttcagaaaattgggtcgtgtcttctgtgtcaaaaaattccattgaagatcaacaatatgatgctgtcatcgttaccgtgagttttactttgcttactgctattgcaccaatctttcttcttttgacacactgataatggcaatgctgttgtggtttgaagccatgttatggggttttagggatatttatggagtctgatctaatatgttattggataaaattcagatctgtaacgtgactcaatgagattgaaaaaaattgaatcaagataatggattggaaaattaggagctaacctagggtctataagcgatccacttggagtctcataccaagcaggtattcgacattttaggtttatattgctgctatggctcatatgggagcctacatagggtctggtgcttattcctttttcttttgtctagttttggggctgcacatttctgttgtgttttgatatggatagccatcacctgcaattgcatggaggctgaactaagttctataggggagcaaacagtatctgttggaaatttattttcatattgtgtttttaaatgctataatccaaaatttgttgttcccctaaaatgcctaaaatacccttatgtaactgctccatctgtcccttaatagacttcccatttctccaatgcatgtttgccaatacacattttgtattgttaatatcaaaaattacatattagtaaaaattataaaagtttgattttcctaatgtacgcaatgagacgaatcaaacaagacgccatatgactatgttttttcttatacttcctatgttttttaataagtgacatgttttccttttagggaaatgtcacaataagtgacacatagctcaaagtagtaaaaatacttctcatttattacatctttgccattatttaattgtttcacctacctactttatccaatactcaaatttgattggttgaacaattggtcccaactttctctagactccttggtattccctttcccccactttctctctgtgtcacttattaaaaaatggaggacgtatattggaaaaaaattggaaggttttcttcacttatgaatagtggtaaaattagagatgggaaggctattttgggatggatggagtaatatttaaatttttaaaataatgtcattgttttagtgatgaaataaaattcaaggctattttttctagtaattatgttatctgtacatcaccacacgtatcgcgtgcatataagactagtttgatgatattccaacactgttcgaaggaagtcaggcatggaaccatgtttgcttccatatgggaaatattttgcttactctccttcaaacatctacctcattatcccagaatgattgatcgaatctaatacaaatatacaattgatcatatgccaccagggaattacatcaaattaaatttttatagaaggggaatcagtcatagcctcatagggaacgaataagtgatactcgccagtttctttcctggttacttttcctcttctcactagccatcctttatgtatgggtatgctgcatcattcctgccactggttgggactcccgtttgaactatggggggatgggaaagctaagccatcatcttcaaattgagtttcttgagaatgtaagacaccatctgtaagatgaatatagtgcactctatagtcaatgtcatgatctttatgggtttatctgctgaaataactgtgatatacccagctctccatttacaaagttttcctacatattaaactcttgcccgcaattctagaacttcattgtagaacttttcctacataagcatcatttgtcttttctgtagtaaaagttagaaagagctttattttagaacattcgtttttagttttctttgttgttgattactccgccacttttaatacttttatgattcaagtatttgacaaaatcatgtaatttaggtcctctgctgcatgcagtctataccctctctctctctctctctctctctctctctgtggttgtgtcttacttgttgagttactaactccagccattacataaagtaggctggcattatgatgagcaaattactcaagaccacatgttagctcctttttcttttctccttattctgaaaggcaaatataggtccatcttggtgcttctcatgtcataagtaagctgaccccctccttttccagggaataggacaataatccaaaagtgagggttttacatgttgggatttgtgaagtttcttattttacttaatagccgagtcagtgttacaatacatagtaccgtgttacaaaatagtatgtaacaccaagcatgtttatgtgcaaaattgtgcaagactttgttgctggcacgccaagggctgttttaatgtagtttacttattcttttaggtttttcagatgacaatcataaagggaattaggagtgtttttattgtagtcaatccctattgtgctacaacgataaaagaaaaaagcacaagactagaaggagaagtaatgtctaggaaagactcctcacctggggttgctagtcacctacacatcttagaaggcatcaaaccaaagcttattcccctcgactgttttcgggagaaaagaagacaaaattgtttctaacttatactttaccagtttcactacagcatcagaaagaagcaaaatatgctcccacaacacggcgaacctagctttccagatgtgataaaccagaccagcaaaatgattattttcactagagctttgagtctattttttcggtttttccccttcttcctggtaatgtcacgccaccaagccatcatctcaattttttgagatttgacgtaatcgctcaaatagctgagtaagacacttcttgctctaaatactaataaaaaagaggtgaatgtgggtctcagccatgttactcaaatcggataaagtgtctactcttattagggtttttgggtgttggactcatccatttttttttgtaaaatgtcaagattttggtttgaaatgagagattcaagtgtcgtgacatgagtcggcacgcaacacttaaacgtgtcgaagtaacagagggtctcagacaatcaactttaatcaatcacgaaccccaaaatttatgcaacctttgctcatattcagtctctgtaaagcactcaactgcagcacacccacccattcgcttcacctacagcaggagggcacccaagtaattgctatgatgagcgaattattctgttttgccttgctggaatattgctgttagatttgctgactcactggcagttaattatagtcagagaatgagaaatatcctgtagagagagaaagggtatcttttgtatttagctctataaatagctaaggaagggaagggcattgagagtttatgatattataataggagagatttagcctctcgaatgctgataggagcgtagctcttgttggattatcaatactactctgtttgctctatctatttctactcaggttccttcttgtacagtggatccctgattggatttacttcatcaaccagcagataaaattatttgtaggcacattgaaaccattccaaacctaatgaggccaaagtttatcacaaagaatataggagccaaatgtaggcaacagataagagtataattgccagaagttgaagactccaggtattgttcagaaaccttaatgcatatcatcattctgacactagattttccccggagccaactaacaaaaatgaattaaagagattaaggctatgtttagttcacctgaaattttctgatctgaacttatctgatctgatctgaacttattttttctgatctgatctgatctgatctgaaccaatctgattacaagatcttatcttttagatttttctcaatatataagaaaaaatatagtcatgtggggtcttgtttgattcgtctcaatgagtactttattaatattcaattattataatttttactaatatgtaatgaaagatataatgatttttaaatataagcatgatctgaactgatctgatgtgaacttattttttctgatctgatctgatctgattagatctgaaataagcaaaaataaggtgaactgaacatagcctaagcaacaattgagggaaaataagatcattatggctaagataagataaatatgtaatgataaaatcagagtaattatatcagttacactctcaacattcgtcagattgaggtttcctcccaaaatgccaacccacttttctgtattttcacgtccttctctctacccttctaggtatatattacatcagctgtaaaatttttgaaccaactagtagaatactgatctaccctcaactgcctcactttctcattttttctgggcctttttctctctagcacaagtccacataagtgatgcatagcagaaatataattccactagtcatcctcaatattgatataacaaacacatcacccacatattatcatttttaatcgctgcatgcgaggcatacttacccaccaatcaggatatgcataacagcgttcctaattccaaaaccaccatatatcttgggtttgcaactctcatccctagcaacaaggggactttctgaaaaagtggcagattccgcccacaagtagtttgtacggacacctttattatattattaatatcatatttcggcaacacaaattaccagcccagtaaaacatgaattgacatgagactaacaaggggcccaatctaatatcgtacgtctgtactaagcaatgtataaaaaaaagctcaaggtgcattgatgcaatagggatcctaatgtgcataggtgcgcctcattgaagtgaggcaccactaaggataaataaaaaagattgatgtaaaattaaattgtgcaccttgggtgcgcctcgatgaactttttttgtgtgcctaagtgtacctcaagtacgcctcattgatatcgcctcgcctggcagaaaacgagcttgaccccaatcgccttgctccccaccgcctaggcgtgcctcagtcacactttttaaatacattggtattaagtactcagaatggcaaaaagaaactttgggcattaattagacatttcactttttgtgcaactatttgtgacttcagagattgatatgttttctacattacagacttttgtgatggctgcatggtctccactgtcaaagaacattagtttaagtagaagaaatattgctctattaccttcctccctctacaaacaaaatcctaaaatgtggttatgtagtgccaattcaaacttgtagatgcatgactaatgctttcattatgctgtgggtttttatactatgattcatgtccaattacataacaattagctggagtcaggatatgtcacggaaattttaagcctggcaggatgattgtttatattttctctttttcggtgtttaagtcaaagtaaacttctaggctgctcttttataggctagttgggctgttggggagatctacacattaagtgtgaagaaatcttgtctaactccagtttggttgagaactgtaagctgtcataacatttgttgcatgatgaggccttgtgggattatcatgttagctgtaaactctaaacttacttgaaatctagtgttgtgtctccttatttctgtagtcaaaattgaaccttctgtacgtttttgatacctgcgactagaatgatggaattctgaattactgatactattacaaccatctgctaagaacgaagatgactcttagctaatttctcagcagatttagagaaattaagaagaattactaatgaatatttaaagagaaaactaccaagatatgattgtattgatgaaaaacaccaattacaacctaaccaacattcgagaggttggagctctcccaagtaaccatttctctcactaaacttatcaattttcaagatgccttttccattctcagttcctctatatttatactactccccttagcaaactacccaacttattccccaagtaaactaaagagataatatctaaaatacccttccccctacaataatattagttcttagcattaccggccccctaaacttccaccttgtcctcaaggtgggtcgtaatcatcactaaattctgggcctctactcgtatattcagtgtcttgcagcccttcaggccccaagcctaggttatgcagctcgtgttgcggctcctcctcatatagttctctggctggagtgagtgcctcaactataatgaaaaagtcctggaggtggggaaggaaggagtgtctgaaatggtgtggtgtgctgctggtgttatgggcttgtgcctgaaagttttgggtttaaagagatggagtggagaagagtggagaagtgactggagacgtaaaagaaggaatcataatttttgtaagtggtgggttgaaaaagttggtgggaagaattgtttttataaaatgtagtgtaatggtcgaaaaatgggtggagtaagtatggtttttggctggggatgtggtactgggttgaaaataaataggtctgagcttacttgtaaaattggcctcaacatgagcaggcccaatatcttgagccaattccccaaaagctggcaatagagcactcttaattgcattgttgtgggccatcgggctccaaacatatattcggaggagccggacttctttggtgatgtcattagcttggcccattgcacactttcccttaacagcctcaagatcttttcccacttttgtaccccaaccacgtggcttcaccatcctttctttcttgcttttgtcacttttttggcaatatacgagtttgtccttactaccctcatcttctaatgttggcttcctcaccaagcttaatttctggaattttgtccaccaaatcccaccacccatcgtcaacaccatacctatctacaccggccaagaagcctggtcctccacccgaattttcgccacagacaaagcctgaacaaccgtcagttctctcaccggagaagttcacaggtccaccacctgacccactagttgctgatccacccttcacaaatctccctcctctggctgccacaagtagtggttcctccgtaatactcatatttctcgtccaagagccctggaccaccaccggacccacttccaccggcaccaacttgttcaaatgatacttctctttcttttccaaacagcctacttggactggaaaaaccactgcgattgtagcctccgccagatctgtagcctagtgcacctaacgtgcttccaactgcaacccaatagggatggaaatggatgggattcggggagggtggagcatcacccgcatccgtcacccgcatccattcgctccacccgctccacccgcatccatccatccgtcacccacgggtgaaacgggtgggtcggtgataaacgggtggaaccatttagggggtgtttggtatcatgtttttttacaaaagaaacagaatcaagtaacaaaatccgtttctacttgtttggttctatgttgctcagactcgagtacccatgtccgacacgggtacgtgtccaagtgtccaactcagctattttctagaattttttatattttttaacccaaaacaaagtgtccaagtgtcccacccatgtccgactcccgaggatccgacacgggtacttgaggtgaaatgaagagtccgagcaacggaggtttggttagtgtgtaaagtaacaattaccgttacttgaggaaaacacatccccccaagttgtttccattcaaaaacctaaggaaacaaataacgtttcactcctcaaacaagaggaaagggaatgggttatatttatttccattccattaggataccaaacaactaataagggtaacacttattattatcctttcccctccttatcaaaatcctttccattccgtttacggtattcataccaaacacccccttagtatattttctaatgaaatttgtgatatgatatgcatgatataaaataattctatcaaaaatataaaaagtaagtaaacttacatgtacaacttaatagatgggtgatgggttggaggttaaacgagtgatggatcgggtgacgggtgaagaaattctcacccaccactcgctttccatccatttaaattaggtttttcatccatttaaaaaaccgggttaaacaggtgatgtatgatccatcacccatttccatcctcaaacacatcccgatttgtttactgcaccaccagatccaccagtataaccacccgaaaaatcatcatgccttctactagccttgtaacctgctcccggtgagaagcttcttccacaagtggtggtcgctggacctccatctccttcttccccaaaaaattttccatgacacccactcgacccttcatctgtgacaacctcttcttcgtccacctctgaagttttggggtcgtcttcctcctcaagctcctcttgaagtaactttaacttccgttggatgggagagaacgcttcattgattatcttcaccagatcttcttgaagtttctcgaaactttttctcacgttttcctctacctctttcgtgatttcctttccgatctccttcatttttagactaggagctcttgcgattccatggcagatttctttttttaaaacaagaaaatcaggcacttaatctcccagaatagtggtgctctgataccattttctaagaaccaagatgactcttagctaatttctcagcataacaacaaatttagagaaattaagaagaattactaatgaatatttaaagagaaaactactaagatatgattgtattgatgaaaaacaccgattacaacctaaccaagaggttggagctctcccaagtaaccatttctctcactaaacttatcaattttcaagatgccgtttactactccccttagcaaactacccaacttattccccaataaactaaagagataatatctaaaatacccttccccctacaatattagttcttagcaccatcaaactgggatggatggttttgtaaggttccaatttacttctccatcaaaatattttaggattttttatctcatgtattttagagtttcctcgtccctttttatctgataagattcttctgatgatttgattttatggtaggctccaatcagcaatattaaagaactgaagattctgaaagctggagttccattttcacttgacttcattccagaggtttgtatttttatagtggttagacatgcttcccctagttttcaaagtaaaagcatccttgttgtgacgatattttttcccttgtttttgtttttattattatcatcacttatttccattttctattttccatgctgataagatgttcatcaccataatcttgtggtatcagaagtgtttagtggagtttattcactacacatgcagttgttcttttgccatgaccgccattcattttctcgtcaaaacaaatctatgaagtttggttttcagactcatggttcttgtagctcttgtgaatttttttttcttctccttgcatgcattcttcaaattacatattgcatataccaggtgctctcctttattttatatttaatttttaaaattctatcatatattttttaatgtcaaacctcaaactaggggttcactgcatcttaggcttaccaggctaatatttctttacttaaccttttccctttatatttgctatcctcttgtgtagtaatcaccataagaagggtacaaactaaattaccctcccattcttttgtatcattctgaaatagtgtcacagagctttgatttttttgccctcatttaatctggcaaatgttctctctatttttttttttttactttcttttgacgggattctcaggcaattgttacggggagcagccagtcacactgtttctgtttattatgcaggtgagttacctgcccctctctgttatgattactgcgtttaagaagaccagcgttacaagacctcttgagggcttcggagttcttatcccttcgaatgagcaacataatggactgaagactctcggtaattgtctggttcacgtgtgtagcgaatcagattttcaaaccctgatttcgtaacattgcaggtactctgttttcatctatgatgtttccagatcgtgctttctccgatatgtatctctatactaccathgttggaggaagcagaaatagagaacttgcaaaagcttcaacgtatgagatatgcaatgttttaaatgtatgctatagtcatcgtttcaaccttttggtgcctttttcttactaatttatcctcctggtttaatgatcttagggatgaattggagcaaatagtttcgtctgatctccaccagctgttgggcactgagggaaaacctacttttgtgaagtattgatatctttcacccaacttaacatgatttgtgcttataatatgttaaataaagtaactgaaatcctgaaattaagactacgaaactgtatggtgacagtcatttttactggaacaatgcattccctttatatgggcacaattacgactcagttctgagagcaatagaaaagatggaaagagatcttcctggacttttttacgcaggtaatctgtcatttgcttgttgcgataaagttcatgtacagttggcatatcaatcaacttgcattctttcttgctaactccaaacaatcaggatcattaacttgtaggctgcagcaacagagagtatctcccaagttgttaggtttcatgtaacctcgtcgctgagatgaaatttccgttggctaaaaagtgaaagttttgtattgatgttacccaaaacaaaagtattttgcatgttgcttgaagttttggttgtttcagatagtacatcctttgacatgaaaataaatggaaaagcgtatgtcaagcaattatcatctagtttctttgtttctagatactagccgcatttgatcccagatcatttttgaggaagtcagctgaaataccgtagctatccttcagttttcataataaaactttaatggatctgatgtacagtaatttagtgtgcaccgggttaataattgatattaacttcatatagtgagtcttataaagatataatgaacttatatacaatatagtggattttattaatggaaaacatatagtgaaactatatgcaatatagtatgatacataaagacttagacaacaagagcattcgaaattacaaagaacaaaggaaagaacaattgtatcaaaccggttcgaatgaacaaacaaccaccacttccacaatcaatgtaccaccaatcaagactaaactataacaatgagcttctagtttaagtctactttgagttttaatcaccaattcaacgattagatgatcaaaattgcaaaggttaagagttggtcaaacctaaccaagagttacactaggcacatagctttgttaggagtatattagtttatgaattctagttaagttagaaatccaatacctagttggattaggattcctaattggattagaattatagtttagttagaattctagtaatagtaggcgtgtgattaggagatataattagcttaattcttatattgttagtttaattcttatcctcgttttaggtttatctttagtcgaacttgtaccctatataaggggcctttatttcattaataatatagtttattttgagtttaaacctttacttgtgattgtttgcttgagaggttattaatcgaaccattaataacttttcaggattgttaagtttttagtgttaaacatcttaatttcaggagtgattttaagagtgtttagattcttgtattcaagtttcaggactgatcttgaatcaagaaatatccctagtttcgactaatatcataagtagttcgaattcttggagtcttttcttcaagattcatattcataacttgattatttagacttcttggttttgtaatcatatcaagtggtatcagttttccagggaggagaggatacaaagggttctctttgatcaaagaagatccaagggcatcaataagaatgacacttgcaataagttcgagtgatacaaacaacttcaagactcgatcttttgctaccaagaaccaatcttgacgcctgaagattgttaggacaaaggataagaagtgtttctacatccaagattgcattctttacgtccaagattgcgtcaagatccattctttaagttcaagaaaggagtagaaagcattcgaacactacttaaacatgacatccgagatggataagctggctatggccatgagtgccttggcacaatcacaaactgagtcacgcaaccacatgggtaggatggaggcacgtgaccgtggattgaaactagatgactatagtggagatggcaatccagaagacttgttggagtggatttgccaactaggcaaagtgagtgattataggggctttgatcacaagaagagattcaaggttgcttccattaggctcacgaagtatgctggaatacggctcgaaggattgcatgcacaaacttcttgcctaatgactatgaacaaaaacagttcataaggctcgcatcaataagccaaaacacacttagtgtacacgaatacagcatggagtttgacaaattagggcttatatgtgacatagaagagaaagagcaatacaagattgcaatgtacattaaagggttgaatcgatatatagccaagaagatcgaagtctcaacttatcacttctttgaggatgtgactaaattggctaagaaattcgaagagcatgacaaagaagaagggcctaagagttcttacacacctaagtatgactctagtgctaaagggaaatcaacagttccctactcaaggtggtcggaaagacctaagaaccccactacacctaaggaggacactagcatggagaagacaaaagtggccgtacctaaggagagtttaattttgtgttttatacatctttgcttaagagcttaacaattgaaactattaataacttttcaggatggttaagtttttagtgttaaacatcttaatttcaggagtgattttaagagtatttagattcttgtattcaagtttcaggagtgatcttgaatcaagaaatatccccttgttcaactattataattgatcttattcgagttcttggagttaatttcttcaagattcatattcatacttgattattagacttcttggtttagtaatcatatcaatatcattagcattaatttacccccagggagattaagaaaggattagcctaatcaaggcgcttaagaagtttttaggaaaaatcgtgcttgttaagcttaagaattgaacttctttcaccatttgcccttgattctcttgttgaactagaagatcttggttcatagtagatgctcctgcatcatagtagagcatttaattttaattttttaacatgcacgaagatgtaggtagtgtagtatatatcgtgagacgtggtttaacatatagaaagatgtagtttctgcatgatatagtgagtttttgcatgatatagtgaatgtctgaatgatacagtggatcgttccgaattgttgtagtttgtatgatatagtatttttgtgaatgatatagtgagtttcttcatgatacaatgggtttctgaatgatatagtggattgcttagaaatgatatagtgagcttttgtatcatgtagtaggtttctatgtgatataggttgttaaaagatgatacatgcttttggcctcatgtactctaatgttaacgtgaacccggtccttgcaagtcaattgcagttttttcaatattaagctatttttttttttttttttttttttttttttttttttttgtacgggaatatttagcatctttaccacaaacataaccatacgaatattatgcggaaattccagtctgaagtcttaacttttcaaaattaaaagcttctatattatttttggaatgaaaaaaaatgagctatggcatgttattttgaaatacaatgagtctcaaggtgcatagtggcttcaattctacgaataatgaatggactactgatttctaattttttgttccgggcttttgcattaggtaaccataaagatggactctctgtgggaagaactatttcctctggatacaaagctgcggagcttgtgatatcctatctcaactctacttaagatgcctaaatgatcgaggagactccgtaagtcctttctctgattctatctttgaactgagtggaaacacgactgtggtctaaagtagttgatgtctcagatatccagaaatggcgttagtgatattcaggagctgtccattgaccctttgattcattgttgcagtttactgaaagttgttagctggtctcagaaaaacgaaaggaaaaaagggggaaaacaaaaacaaagaaacgtagattgtggtgttaaaatcaagaattccagagatttgtaccttctttatcagttgaattgtttacagtgtgaatcaagaagttagctcgaccttcttttcttgtgaatggtaagatttcgtgatcatcaatacttgattgtgctgtttgcaacttcaacggtaagatttcctgatcttacagtttaattgcttgtgctgtttgccactt

SEQ ID NO: 29 - DNA, 1575 bp, synthetic construct
  misc_feature 1..1575: note = F420I mutated Beta vulgaris PPO2
  source 1..1575: mol_type = other DNA
atggtaatgctatacgattctcacctctcaggagtctcaactcatcttcaactatcgcaggcatttcccaggaagaacccattaatggccaaagtgtctgagccgggtaaacccacttctgctaaaaggattgctgttgttggtgctggtgttagtggacttgctgccgcatataagctaaagtcccatggcttgagtgtgacattgtttgaagctgatactagagctggaggaaaactcaaaactgttgcaaaggatggtttgatttgggatgagggggcaaatactatgatagagagtgaagcggaggtcacgagtttactcgatgatcttgggcttcgtgagaagcagcagtttccaattgcacaaaacaaaagatacattgcgagagacggtcgtcctgtgctgataccttcgagtcccattgcacttctcaagagcaatatcctttcagcgcaatctaagctacaacttatgttggagccattcctttggagaaaacgctatgcttctaagatttctgatgagcatgctcaggaaagtgtgggtgagttttttgagcgacattttgggaaagagtttgttgattatctaattgatccttttgtcgcgggtacaagtggaggagatcctcagtctctttctatgcgtcatgcatttccagaagtatggaatattgagaacaagtttggctcactaatttccggattaattcaatctaaactgtctccaaagaaggaaaagggtggaggaggaaagccttcttctaatgaaaagacacgcatacgtggttcgttttctttccagggtggaatgcagacacttgttgacacaatatgcaatcagtttggtaaagatgaactcaaactacagtgcaaggtcctttcattgtcctacagtcataaggggatcccttcttcagaaaattgggtcgtgtcttctgtgtcaaaaaattccattgaagatcaacaatatgatgctgtcatcgttaccgctccaatcagcaatattaaagaactgaagattctgaaagctggagttccattttcacttgacttcattccagaggtgagttacctgcccctctctgttatgattactgcgtttaagaagaccagcgttacaagacctcttgagggcttcggagttcttatcccttcgaatgagcaacataatggactgaagactctcggtactctgttttcatctatgatgtttccagatcgtgctttctccgatatgtatctctatactaccathgttggaggaagcagaaatagagaacttgcaaaagcttcaacggatgaattggagcaaatagtttcgtctgatctccaccagctgttgggcactgagggaaaacctacttttgtgaatcatttttactggaacaatgcattccctttatatgggcacaattacgactcagttctgagagcaatagaaaagatggaaagagatcttcctggacttttttacgcaggtaaccataaagatggactctctgtgggaagaactatttcctctggatacaaagctgcggagcttgtgatatcctatctcaactctacttaa

SEQ ID NO: 30 - protein, 524 aa, synthetic construct
  REGION 1..524: note = F420I mutant protein of Beta vulgaris PPO2
MVMLYDSHLSGVSTHLQLSQAFPRKNPLMAKVSEPGKPTSAKRIAVVGAGVSGLAAAYKLKSHGLSVTLFEADTRAGGKLKTVAKDGLIWDEGANTMIESEAEVTSLLDDLGLREKQQFPIAQNKRYIARDGRPVLIPSSPIALLKSNILSAQSKLQLMLEPFLWRKRYASKISDEHAQESVGEFFERHFGKEFVDYLIDPFVAGTSGGDPQSLSMRHAFPEVWNIENKFGSLISGLIQSKLSPKKEKGGGGKPSSNEKTRIRGSFSFQGGMQTLVDTICNQFGKDELKLQCKVLSLSYSHKGIPSSENWVVSSVSKNSIEDQQYDAVIVTAPISNIKELKILKAGVPFSLDFIPEVSYLPLSVMITAFKKTSVTRPLEGFGVLIPSNEQHNGLKTLGTLFSSMMFPDRAFSDMYLYTTIVGGSRNRELAKASTDELEQIVSSDLHQLLGTEGKPTFVNHFYWNNAFPLYGHNYDSVLRAIEKMERDLPGLFYAGNHKDGLSVGRTISSGYKAAELVISYLNST

SEQ ID NO: 31 - DNA, 37009 bp, synthetic construct
  misc_feature 1..37009: note = F420L mutated Beta vulgaris PPO2
  variation 32531: note = n is any nucleotide
  source 1..37009: mol_type = other DNA
tattccatcgaatgtagcaaattgactgtccgttgcaatttcggagtttccactcgtcgcatggtaaatggtaatgctatacgattctcacctctcaggagtctcaactcatcttcaactatcgcaggcatttcccaggaagaacccattaatggccaaagtgtctgagccgggtaaacccagtaagtcaaacattcgaatcacaactcaagcaaatttgtcttgtttgcgttatattttgctcatttcagccttttttgtttttccgacctttgcatactgaatattgtgtgtgtgtgtgtgtggggtttcagcttctgctaaaaggattgctgttgttggtgctggtgttaggtaaattttcgtctcttgcagagtttttgagtcatttgggaattctatgtgaaacttgtaactcccttcagtccaacgaacgcagtacaattttctatcaaatcatggtcctaatttccaattttccatatatattgttggaattatattgggattgtctatcactattaatagtattaggatcaattgtagagaagcacagaaatttttgggatcgaaagaatatctggattgccacattaacagcagatataattcttccaattggtttttggttcttcctaccttgacttgtctggtcaaacattataaactttaacctttaatatccattaaagtaaactataggatttttttgtctaaaacatgcttatataacatgaaatttgtgagaaaccaccttatatatatttttttgcgaaaacaaaccttaaacaaaattattatcgtgagaacaaaccttatgccaatttcgatcattgacccaaggttttggcattgaccgtgtcatgaattttgttgggtttaaaaagtcatgtgtcttgcatacgaaatggtaaatgcgggaaccttgggtcaatgtttggaatccgcataaggtttgttctcccaaaaaatgtttttgttcaaggtttgtttttgcaaaaaaacttatataaggtgctttctcagaaatttcatgttttataaagtagtatttgacaaaaaaccctaaaatatattatagaattattattgactaaattgtgtaaaaatgtactcttctaaaagtacattatagtattttagtggaacatttgcgagaaactactttataaatacgatttttgcgagaaatttcctaataaaaaaatgtgaagtgcaaaactatcttattgataattttctactccctcaaatccaaaatactatgaagtctttcctttctggtttgtcccagattagtttgtacgcttccatctttggtatgatcccacttttattatacttattagttttacgtgagttccttactctatctcttttaacaaaaatactcaactatctctatccaataaaaagttccttactagtcctatcacatctgctttttaataaaataacgtttgataaccacacaacttatatccttaaaatacacgttcaaccaagtgttgagattaatttggacggagggaataaatattttttgaggcatattggtagcagtattcggattccgataggttgactatgtttccaatgttgaccaacacttgccttgcatgtaattctaactttgctcttttttattcttcatttccctcgtattccatatacaatgtttagagacccattccttcctcttctcttctttcccttccttactatgctttgccataatcttcctcaaatgagtgcaaattaatttgtcgttgatgtaggccaactgattgtagcacatcttcatagttcatacctcaacacactcgtaattatattataccctacatgttaaatggctcatgaagctttattttatatcatacttcctccgtttcacaataagtgtaacacttttcttatttggaataatcacaataagtgaaaccaagctccaaatggtaagaaaagttcactcttattacaaatataccaccaaaaagtaagaggggatcacaacttcaatacttcttcactctactttattgtggtcccaactttctctctctaaattccttggtaactccccactttctctatgtttcacttatggtgaaatggaggaagtattttgtagtggtatttagctactaggccttggatgatatacaatcatacaatgtatttatattcacgataatttgctgcccaccttgattaccatgatttccaccaattttatcaatttcagtacttcaccaccccgaatttatattttttatttccaaccttggtatctccatttgtctgagtgcccgatccatttgtatcgcctccagaattgaagaagcttcctgcagctagacaattaggaaggttaaaaaagtttggagatggtggaggatagccataataatcattgttgggaggtggaacttggaaggttattgtagggttgaagtccttgatgaagaagaattgagttcaaatgagaggaaaaaggagcagggaagagggacaataagaaaaaaaagggtaaactaaaatcacgtgtaaggcatgtgcagatcaacatcagaaagcatagtcaacctactggtattagggcactgatacctttttgggtcaaaatttttttacaaggtatttcatgaggtagttttgtccatttttttttttacaaggtatcgtctcattttttttttatcatttagtttctcgcaataagtgtatttcatgaggtagttttttccaaaatttcctcatttattataaaatacctcatcttttccataaataatgcaatgtctagacttttacgctgtttacacatgctcctttgaccatctattgacacacaaggaaaaatagagtagagtcatgcaggatcttgttagatttttctcgatatatactttcaaaagatcaatttttttataattttttttttgaggggattttttttttataattatgtacttatcaaaggtcaaagttgtgcaccgggaagcataaaactctatgtgttgcaatttacatggaaggggaggagtataataagagaaaattatggtaaaaggttcattcctggagatcatgagaaaggaagtagaaagaacaaaaaagaacaatgggagtgcttttcaatgtttgttgtacgtagcatttattcatttgctataatgttttgtgacattgtagtggacttgctgccgcatataagctaaagtcccatggcttgagtgtgacattgtttgaagctgatactagagctggaggaaaactcaaaactgttgcaaaggatggtttgatttgggatgagggggcaaatactatggtaatgtttttgattattgcaggtcttgcactttagcgcacaattaatttctggatttttttttgtactgtggtggttatggtcatcaacatgtctcacccactgtgcttgcagatagagagtgaagcggaggtcacgagtttactcgatgatcttgggcttcgtgagaagcagcagtttgtaagtctttcattatctgaatggcacatactttatttcgaaagattgtaattgccttttctttctagatggcttcatcttcatgttgctttctgattcagtttcgtggctaactttccaagtttgtctgattgctaactctgtcatagccaattgcacaaaacaaaagatacattgcgagagacggtcgtcctgtgctggtaagtttgcttgttttacttttgacctcttttaagatctttcaactctggagcctggaaacatggtgatgcaggaggcaagttctctctattttacatcctttcttctctgtatcttatgacatttgcctcttattctgtgcagataccttcgagtcccattgcacttctcaagagcaatatcctttcagcgcaatctaaggtcgttttatgttaagacatacttgatgctgagagtttattgaattcttaaccttcttcttattttttttttatttttttagcaaaaggtaagtatattgcatttaccaaaaaacagtatgtacaccaccacagcagccatgtcagaatctagaaataccaccgaaaaaatcctacacccaaccagagacagttatattatatcctactcctaagtttctgtacccaatttacatcaatattggtccatttacaagatatttttataattcacagaagcacatcagttttaattagtttaataatgacctctggatgaataaccaactcagaccatatagccttattcctggctttccggaagttgtacgccagagcagcaagcacagcaatgcaaacctgtttcttatacctccttttatgtgtcttagcccatctcttatagctagtgaagatacagtcgtgtgcacaggattgaaccccaatccaactagcgaaagcctcacaacattatgactataaatacatctgaagtataaatgctgcacctttttctcctcttgcctgcacggtatcagaacaaatcccagctttagctaacaattccctggttttcagtttattcaatgccatcatgcaagcaatgaaagaatgttttggaacattcagtttgttccaaacacagtgagagcaagggacctttcctgcagttccacttagccacttatatccctgactaatagtatgactctttgcaccgtaaattgatttcaacttaactttttcataagcagtgaattgtgtgttgttagagtgtctagctgtctaggagattgggagaaaaggagggaccaaggagatagaaacacacctttgtgtttctttgtgtatttactttttagggtgggtcacgttttctgagaaatttgggaaaaggaagaaatagtaacacactttcccatttgtataacctgtatactggagctccaatataatttgcatttttttttgagctgcaagaatatgttgacaaacagttattgcttcttcctcagctacaacttatgttggagccattcctttggagaaaacgctatgcttctaagatttctgatgagcatgctcaggaaaggtaatgtcaagacatgtgttacctcgccttaattttcgttccaggaggtgagcatgcatttagaactaaaaggcacaaagactgttggtggtcttgcctgttcaaatataatggagaggagttttcgctacatttaccctctcttgaagtggggttgaaatatagcatcaagttgaatgcttgattaagtttaaaggacttgtgtaactctttttctgtttactgtgattacatgacctggttgattaacataatggtctgtttatctgtagtgtgggtgagttttttgagcgacattttgggaaagaggtaatggtttaccatagtatttctgctttagtggtaaattgtaatgttgctgataattatacttcgctgcagtttgttgattatctaattgatccttttgtcgcgggtacaagtggaggagatcctcagtctctttctgtaagtgaacattttgtgcttcactcccaattttttggaggctggaaatagattcttttccagttgttctgtcaaaaatagatgtagctttattttgaatttgaagttcccaattgttcattttgactattactgattattgctaagagtggcattatgctattatgctcctaaaagaaaggtgaattttgacctacatatagtataatgtatcaatattggtttaattgtttgttcttttgttccttttggtgctcatcttgcgccttgttctcatcgctcgttttttcatgttgcacttgatttaaatttgctcagcttaacttgtctttttgaatttatattacttattgctatattttactaatttcgttgaaactaattttttgctgaacttttcgttttgttgaaatcatttttctgaattaacttgattttcctgaatagaattgaattttggtgatcttaccttttctgcagccttttatttctttcttgtcctttttccaatctcatttttttatatttccattgtgttgacatcttatcattaactgtgcagatgcgtcatgcatttccagaagtatggaatattgagaacaagtatggaccataagacgtttattttaatcgacatgtatgtttcttagtttatacatatattaattctgtggtaaaaaaaccgaacaagaatatctttttttttttctatcatcaaaaagggtgaatatatgtagaggaaaaagatttgaatcaagatattagcctaaagcaataataatgttagtaatagctttaataacaaattcaaaacgtacattaatgaaccgagaggccggaaaatagttaaagtgaccactaagagaagcgaaggattcatgatgggttttcaacccagtagggcaaatttgttcaatgttctttacaaatcaagcttattaccttgtgggtgtttttgctagagatgaatgatagaattttccctagttggaagtcttttttggttactttatgggagctagtgatgtaatttgtttcgccttatggcatttcctaacatgtgcttttgtgatgtattgaagctttttttttgccttaatttatgctggattttaattttgttctttgtttcatttttcttgcttttgaaaaaaatatatagatatgtatatattaggattggtcgaggattttgagggaagggaaagacctaagaaaacttggatgagggtgattgatagtgatatgagtctatttgggatcgaagaaaatattcctttggataaggtgtagtggagggttgagggagcaaatttatgcagattagcttgacttaaagtttttctttttgattatttttcatttacttgtgttttgcaaacatttactcatgaatgatgtaaacttcttcaaccaaatctctggaaaaaaataatctacatggaaaaaacattattaatgttaacttgacagagatcccatccttgtgaagcagctagcaattaggcatctaacaattgacattttaatggacaggatagaatgtctcttgatagtcaataccctctgtttcattgtatcccatagctactaatctagtttgtatctttccaaagaaccattattttgaagtttcaccttgaacacccattttgaaccaatatgtttcttgcccttggggagaggggctaattgccatgttttgatgcggatgcaaagacacttgttctacctgagcctattgacttgatcatggatactctagggtttgaactcaagggaaagaatcaagtcttggcatgtgtggtgacatggcgtggggatggagtaaagaagagtcatagttctgttaggatatgttcttgcttgctacatagaatcgtagttctgttaggattgctatgatattatatctagtagatagattttatagttaattaggataaacatgtgatgatcatgttataataggcatgtgattagaggataggattagcttaattcttatcttgttgttagtttaattcttatcctagttttatgtttatcttagtcgaagttgtagccatataaagggcgttccattcattaataatacttagttttgctttgtgttttaaacatacttcttgattattgtttgcttgtgagctaactaatcaaaccattaaagacttttcaggagttttagtgctaaacatcttaatttcaggagtgattttaagagcgtttagtgatcttgaatcaagaaatatccttgttcttgttcgactaatatcagtggttttgttcgagttcttggagttaatctcttcaagattcttattcaacttgattgttgagcttattggtttagtaatcatatcaagtggtatcagttttccagggaggagaggatagataggattctctttgatcaacaaagatccaagggctatcaacaaggttcaaacattgctgcttgttcaagacttgatctttttctaccaagatgcattctttacgtcacaaggtagtaataacaagattaagagtggtttttacatccaagaatcaatctttcacgtccaagatttcatctttcacgtctaagattcattctttaagatcaagaaagttataacaagcatagaagaacacataaccatggagtccgagatggacaagcttgccaaagctatgcaagcacttgcaaagtcgcaaactgaatcacagagtcgactcaatgagaatactaccacaatcaatgggattggtagtaacatgaataggttggaggcacgcatggatgccattgcaaccatcatacaaaagaagcttgatcggaatagtgccaacttcataggtgccaattcagaggaagagttggcagaacgtgaagaaagatcatccaagactacatacaatgatgatcgtggcttaaagttggatgactataatggagatagcaatcgagaagacttgttacagtggattcgacaacttgagaaggtatgtgattatagaggctttgatgacaagaaaagattcaggattgcctccataagactcacgaaatatgctggaatttggcttgaaagcttcaaggcacaacgagccaagaaaggtaaagaaaagttgtgtagttggacaaagttgaaagttcaagcttaaagagaagttcttgcctagtgactatgaacaaaaatagttcataagactctctactataagccaagacacgcttagtgtacatgagtacaccatggaatttgacaagctagggcttatatttgacatagaggagaaagaacaatggaagattgcaagatacatcaaaggcttgaaccgccacattgccaagaaggtggaagtatccacttatcacacctttgaggatgtgacaaagttggctaagaagtttgaagaacatgagaaggaagagaagcctaagagttcttacacgcctaagtatgatactaatgctaaggccaaggctagcttcctactcaaagtggtatgaaggacctaagaggctaagaacctcaccccacctaaagaagacacaagagttgagaagcctaaagtcgtcgttccaaaggagaaatttgaagagatgagaaagtgcttcaagtgtcaaggaaggagacacatagcaagcaattgtcctaacaaaagagtcctcaccatgagacaatacctagctttgcaagaagaggaggatgtctattagttcgtccctgatgaagagcaaacttaggggaagaagaggaggaggatgcttttgctgaggatgatgcaaggctagtaggggtcaagaggcgcaccttacatgtcgaccatacacctagcatggagcaaatggaaaaatcttttccacactagatgcaaggtaggtgactatatatgtaatggtataatagatagtggttcttgcactaatgttattgtatctgaggtagtgtcaaagctaaacttagctacaagggcacaccctaagccatacaagttgagtttgctagatgatagcactggcatgagagtaaagaaacaagctttgatttcattctctataggggttataaggatgagttatggggtgatgtattgcctatgagtgcatgtcatctcttgcttggaagaccattgcagtttgataaaaaggtcatccatgagggggactctaatgtgtactctgtgttggttggttctaagagggtatgtttgcatcccttagctcctcattcagtggcgccaaagcaaccacctaagacaccaagttactttctatcttcaagggagttcgaacaagaggtggaggaagaaggttgtgcttatgccttgattgtaagacatgctgccacaagtgtcaagactactagcaatgagaagctcgaagccttgatgaaagagtttgaggatgtctttctagaggaactacgacccttgagaggcatagaacatgctgtagaccttgtacctggcgcccctttgcctaacaagcctgcttataagtgtgatccagtggcatctagggaattgcaacgccaaattgaggacctaattgaaaagggctatttaagggagatcatgagtccatgtgttgtgccagctttactagttcctaagaaagatgacacatggaggatgtgcatagatagtagagcagtgaacaacattacagtcaagtaaaggtttcctatgcctagattggaagatatgttggataagttacatggggcatcaatcttttctaagattgatcttcgaagtggctaccaccaaatgaggatcagagaaggtgatgagtggaaaacaacattcaagaccaagcagggattgtatgagtggatggtgatgccatttgccttatgcaatgcgccaagctctttcatgagcttgatgaatgaggtacttcgtccgttccttaacaagtttgtggttgtttacatagatgatatacatatctatagccaaaatgtggaggaacacttgttgaacttgcgtagcttattcatgaagcttagagagcaccaactctatggtaagattgatggcgacgaggttgacgggggattatggcggcagtgaatcaccctctttgccggtcactgaaatacaacctgaggtatctttaaattctgtaattggattgactaacccaaaaactatgaaattgctgggaaaaattgctggatgtgaagttgtggtgatgattgaccctggggcaacccataattttttatcactagctactgttgagaaattagctattcctgtgtcggaatcggaaggatttggggtttctctaggggatggacaggcggtgaggggtagtggaatttgtagaggggtgttattgagtttaaatggtggagttgaagtggaaacagattttcagcctctgggtcttggtaattcggacgtgattttgggtgtacagtggctggagacgttggggacagtggagagcaattggaaaacacaaacaatggggtttgaaatcgagggtgtcaagttcactttgaaggtgacccatcactggcgaggtctcgaatctcactcaaagccatgatacgtaccttatgtaaagagggtggaggtttgtggcttgagttgaaccagattgagcattatcaggagaaaacaccgcattcatcagccttacctgaaattccagttttcttacagagagtccttacccaatttcagtctgtgtttgctacaccagaaggcttaccaccgataagagaacatgaacatgcaatagttcttagagaagggtgtaatccggtaggggtaataccgtaccgttatccacagttccaaaaagatgagatagagcgcctcatcaaagaaatgttggcttccggaatcatcaatccttccacgagccctttctcgagcccggtgatattagtgaagaagaaagatgggtcgtggcggttttgtgtagactatcgggccctcaataaagaaacggtccccgataagtatcccattcccgtgattgatgaattgttggatgagcttcatggggcaacacttttttcaaaactcgacttaagggccgggtatcaccagatccgggttaaggccgaagacactctcaaaacagcttttcgcactcatgaggggcattacgagtttttagtaatgccatttgggttgacaaacgcgccggcaacgtttcaatcccttatgaacgaggtcttcaaaccattcttgcgcaagtttgtcttggtatttttcgacgatatattggtctacagtagttctgccaggaacatgaggagcatttgaccttggtgttgcacaccctagcagctcataaattgtttgtgaatcagaagaaatgtgattttggcaggtcggaagtagcatatatggggcatatcatctctggtcaaggggtggctgtggatatggagaaggttcaagcgatggtggaatggccccttcctaaaaacctccgggaattacggggatttttgggccttacagggtactaccgcaaattcgtacttcactatgctcatatagccaagcctttaactgatcaactcaagagagatgcgtttgggtggtctgaggcagcaactcaagcctttgaaaagctcaagaaggcgatgatcacatcccctgttttggcaatgccggacttccaagagttgtttgtggttgagaccgacgcatccgggtatggtctgggggcagtgttaatgcaaaacaaccgacccattgccttttacagtaagttgttaggtgcccgggctcaattaaagtcgatctacgaaatggagttgatggccatctgcatggcagttcagaattggagatattatctgctgggtcgacatttcctcattcgtacagaccaacagagtttacgtcatctcactcagcagcgagaagtaagtactgccttccaacgttggatgagtaaacttatggggttcgattttgaaatacagtttaagccggggtgtgccaaccgggtagctgatgcattatcccgcaagacagtgggagaggttgaattgggtgcgctgatattaactcatggggtggactggaccgacttggagcgtgaaattgaaggcgatcctctgttgtgcaaaattaaacaagacttccacgggggtgctattactcctgtgcacttttctttggtggacaacaagctgttgttcaagggtcgatacgtgattcccagctcttcggtttttattcctaccttgctgcgagaatatcacgattctcccattggagggcattcgggggacctcaaaacatatctcaggatggctgccgactggtattggaggggcatgcgcaaggatgtggcgcggtatgtgcaacattgtagcgtgtgtcaacaacaaaaaatgtctcaacagatgccagggggggtactacaaccactccccataccttcctcggtttgggatgacttgtcaatggacttcgtggaaggcttgccatcttccaagggggtaaacaccatcctcgtggtggtcgatcgtttgtctaagtacgcccacttcctcccactacgtcatccatttactgctgtgtcggtggcaaatgtgtttgtcaaagaggtggttcgtttgcatgggtttccttcctccattgtttcagatcgggatcgaatttttatgagtgtgttttggcgggaattatttcgtttacatgacaccacactcaaacgaagtaccgcgtatcatcctcaaacggatggtcagtccgaaatcgtcaatcgagctctggagacttatttgcgttgctttgtgggggaatacccgcgctcttgggctcagtggcttgggccgaattttcatataatacttctcctcatctctctaccaaaatgaccccgtcaaggtcctttatggtagagaccctcctactgtgatacgggttaatcggggagcctcacctgttgaaagcttggaaaacatgctccaagagcgagacgcagtattagatgccttgcagattaatctgattaaagctcaacagaaaatgaagagtagtgctgatgctacaagaagagaggtgcattttaaggtgggagatcgagtgtacttaaaattacagccttaccgtcagaaatctttggcttaacgcccttatgagaagttagccgcccgtttctacggaccatttactattttacagaagattgggcaagctgcatacaagttacaacttcctgtttctagcaaggtgcatccggtgtttcatgtctcccaactgaaacaggccgttggttccattcccgtttcagccactattccagagcaattgtcttctgacttggagttagaggtggaacctgatgaactcctcgatgttcgtagtgtttctagaggccagcacacttacttggaagctctcattcagtggcagggattaccatcattcgaagctacctgggaagatgtggctgctttccatcaccattttccatccttccaccttgaggacaaggtgaaactttgggggggtggtaatgtgatgcaccaaactaccactccactactcacctattagaggcgtaagaaaaagggggtaaatcaggaatagtttacaaattctgttgaaaggaatattttgtaattatgatgtcagaggttgttagcaaaaaggcagtagagtaacaataaaaaggggaagggaggagagaagaaggtattgagatttttgtaaggaacttggcccttgggagagttgggagcctctcgaaagctcaccattatcttgtgaatattttccttcctggttatatacaagaaccttcctctgtcaatttcttttctctctaatcttatttcttattctgttttctggttgccattgtttgaagttgcttgttgtgcttgagtaaatacgtgaagtggtgaaacccatctgaattcatcacatctattccaagtggtataatacaagcttgtaatccaaatctaatgagaaatctaagttatgaagaatttcaaaagaactaagtacccttgttttggatgcccaaggatttacttgccgctcaagttaatgctcaacgtgcaagatacaacctctttagtatcccaaggtagtttccataagaattaattgagctcaaatcaagaacaatatttttatgtattaatgtgaacacttcctgaattatattagatatatggtctgaaggttggaagaaagattagcttttaattttaagtttgagatagtttttagaatcgaggaaagattagctcttaacttgtaaactaaggattgctttataagtaaaacattagttatggaactcttaaaattggttttgaacatttctagttaaaaatcccatgtaattctcccaaactagcttaaaatctcacatttcacaagctaaggagagacaaatggcgttctcttgtgaaacaatctaaaattttcattaggctactgttttcaagtatttatatgttagaagtgccgcatataggtacataaaataagtttacaaacacaagtaggaataaggaaaactaaaagagaaacttcagccatacaaaaccggctgaaatcagctactactttctactttctagcttcaaaatctgattgcaagtctcctttaagccaatcaccaatgaaaacctttcctccacatgaagtgtgctcaaatcaagagaagaaacccatcattcgcctatagctacctgggtcagatgaagatacggcaaaaaaaacgctggaaatcagtgaaccaaaataagcaccaattggatgctttctgtccttgctacattttcttctcataggactacttcaagccatacatgaataagcagttagatccagctcctagcatccatttgatcgtacaaatgagctccaaaaagataagtaaaaccaagcagccaaaacctaattaatactaatgatgaattagttgaatagctaatgacgatgaagcaacactttagtaggaatagtgttaattatgatcaatgctacttaatcttctgattaatttttggaaaaatgtcatatctaccttctgtatacacttattcataactatatcgtattattattatttttaaataactaccttttaagtaccaaaacctaagaaatcaggcacttgatggattccatccaaagatccatttggcggggcccactaactgacttttgattttttgcctttcctcttttggttaatctcaatggttcatcaataacaactcaatcttctccccatttcatcaaatcatccctaaatcagaactttttcaaattcacccaaatgaggttatggaaacctctaccaagtttattcgaccacttttagtctagctcaaagttttacacttgcttcaaaaactaagatttattaactttagaaattaggtttttatttttattttttatttaactttgtaacaatcttaaataactcaggtgctttctagagtttggctttaattgtttttcccttggttatgtgaaagaagtatgactactttctccaagactaaagtagagagcaaaaaatgcaattctggaatttcttgcaaaagaaaaggaacgagttaatgataatgaaaaacaaagaaaatgatgagaagagaggagctgaatcaatcatgatcatgtattttaaagttttttttgctattgaagtgacttaagaagaggaaagaggatgagtgaagacaaacaaaagaaaggataaatagagggaaatcttgggcttagaaaggtgaaaaggtaagaagatgagttagtgggccccaacaaatgtatctttggatataatccgtcatgccactgtttggggcttgcttaagtccatacattacttcactaattttacaaaatttattttcttgaccaagaactgaaaaaaccttcagtggtgatctattaggttttggaagttaaaaggtagttatttaaatgtttttaatataaaaggtagttatttagatatttttaatataaaaggtagttatgtgaataaaagtgtatataaaatgtaattttttgacatttttgccttagtttttcttgctaattcaccttttcaacttgaccaagttgctatgaggagaaaacgagcaattattaagcaaatcgcaacactagcattaatccatggcccatgaaactctccataattagagattggattagcacttagtagaacttcttgctcctgctccaggtttccattacttctttatctaagtgcatcaaaaggttgttgggttatgaaaggtggtggttgtgtatagtcattgtcaaaatgttgttaatgcactctatttagaggatgagggattgaatagttttcacctcgtgacctttcattcctttttaaaaaaattgataatgtgtattggtcctatgactgtatgaatggtaataagctatctcatgagctgttactatcttcctcagagtctaggtagaagggtttgggctgataattttctactatgtgcaattagtttgttggatttggatatgctagttgatataggtcctttcccttgggccttctcttaatataggcctacagtgtgattgaagataaatcttctggagaatataagaacaatgagatggattggttagaggttgatttgttcttttggtgtaagactatttcgggttctctattggttatgttcagacgccagaatatgtgttggtgattgttttccatgaacatactttatccgcagagacatttttcttttttcttcctataagattatatttgtttcctctcttggtgctcatctcagtgtctctactttacgttaaactgttgacattacttgacaatgcgtatatttgtcgcatggtgctcttccctcactccacgtcgaccccatacatcaaaaaatgccattaaagaatattcgaactcacaaccttgtgttgaaagaatggaatccctaccaatgactcattaattcattttctctttaagaaataaatgatttcctcacaaacttttaggctttaagagcccaaaagataaaaacataaaataagatagacatcaacgtcaagattagccttaaatgcacaaagcacatgtcaaatgattgataactactcacgagttgcaactctttgggcgttgcctaatattaattggatctcttttaaaaattgttggtggttatggttggtggagaggaccatgtaacttttagctggtcacaactggtaatgattgtcacttttactgcccataaaaaaatttaaactgttgaatatgtttctggcagtggatctgacaaatcctttacaagttggcgtccattttgttttgccatgtgactcaattataatacgtgagttttattatccaccaggtttggctcactaatttccggattaattcaatctaaactgtctccaaagaaggaaaagggtggaggaggaaagccttcttctaatgaaaagacacgcatacgtggttcgttttctttccagggtggaatgcaggtattagcatgtagctttcattctgttaacatttgtggttcttccagacatacatccaatgctttttttttttcttgctataaccataaacattcttgtcatgaacattctttaatactgttgctgagcttagtgtattcgttcattcatgtaatttcctctcttgaggttaaaatggcatacagccttacaacctatatccataatgctccttagagtagaatccctaggttataacatagtaccacttatcaaaataaacatggcacacactgcaggacaagaagtaaatccacctagagaactgagcacctagtagtaaaagcagcgatacattactaataacagtagcagggccataagagtagtaaatgggcctcatttcaacactccccccgtaatggtgagagagaagaagcagtctgaactcccagcttggagagcaaaatagagtgttgctgaacagggagaaccttagtgaaaacatctggcacttgatcttgagatggaacataggtaggctgaataaccccttcttcatttgtattgtccctcaggaaatgacaatctatgtctacatgcttggttttctcatgatgaactagatatgctgctatggcaagagcagcttggttatcacagtagataggagtagcactggactttttaatgcgaagatctttgaggagttgtttgatccacatcacctcacacacagcaagagccatggatctgtactctgcactgaccacaagaaattgcctctttgactttcaagatacggggggagtcaccaaggagcacacaaaaccagatgtagaatttacaacacccatcccattcactatcacaaaatgctgttagttgagcactagacttgttcgccatgagaattcaccctgttggcagcttgaagatgcacattagtggggcagtgcataaatttgcttaaatcatgtatagtgaaggcaatatcaggcattgccttgtaatagtgagataaatgagcttccccatcaatttttgatacacatcaggttgttgaagaggatcaccattgtcagcatagagcttgacatgtgagtccatacgaagcctcaatcgtctgcaatttataaaaccatattcatcaacaagacccatcacatacttctttagagataaaaacgatacttcactacactgatccacttcaatcctcaaaaaatatcttaggccacccatatctttcatgtgaaattggccagcgaagaaactctttgcttcctcaatagttgctaaactattgccagcaagaatgaggtcgtccacatacaccaatatagcactgaaacagtgagagttttgcttgaagaatagagagtagtcacacttggattaagtgaatacattttgctttaaagcagtgttagcttggcaaaccattgcctcaaagcctacttcaagccataaagtgacttaagcagcttgcacaccttagttcatttggtgtcacttctgccatcagtacttagctccccctctccttgaactttgatcctgttacatgtttcactatatcctggtgatagcttcatgtatacactatcctacaattcaccatgcaaaaaagcatttttaacatccatttgtttgcaagaaccaaccctctaaggatgcaacaacaagcatgtggtcatctttgctacaggggtaaaagtctgctcataatctattccatatctctgtctgtcacccatgattacaagccttggcttatgcctattatttgtgccatcagtgctgtattttgttctgatccatccatgtgagggatggctcatttctacaaaatcctagttccgttaggatttgtgttgttttcctaattctagtaggaataggactcctaaaatcctaatcctcctagttctgttaggagtttaaaagttttagtttgattgtaattctagttgtgttagaaatccaaatcctagattcatgtcacgtatggttagaacatggctagtaggataatttgtcttgtgatgtccatagccttggcatttgtggcacctaactttcaatagcttgtcttctgtctccttttctttctccttctttgaggaatcaacgtttttagagctatctaaaccactagcatcaatattaggtttaaaagtgctaaaagatttcgaatagttcttacttgcatacaatttctttttctagtttatgtagcgtcaccagggaacaaaaactcggccgttccgttctggaacggccgctttgtaacggatttcagagaggccgttccgttaaataccgttctagaacggtgatttggaattcacaccaaactcggcgcgatagcgttacgtaacggtgtaacggcgttccagaaccgttacaatcacataacgtccgttatttgaagaagaccagttcttttggtggaggaagaagaagagccaacgcaagatctatagatctgagttaaaatttgaaaataaaacatgtttttttatttaaattaaagcttacagaggatgtagaactcaaattcgagtaaacccctcctttaatttcattaggttactgcaaatcgaaccctaaattgcaaaccctaatttcgaaaaaaccctaatatgcattgggatgcaacgctgcttctccggtcatggcagagaaggtcgacgagtcatcttcggctgcttttagcactgtagctgccggtggttggcttgtttgcaggttagtgcttgctggttttctttctctcataccgatcatcttcttcttttctctcttctctttttcttttttattgtgtgactgccagtcacgtgataattgcaactcataaagtatctctttctctctcttcttttcatccctttttatttttctttcccttttagtttttattccctcacgtggaatcacctaattttcatccttttttatttttttagttacactcttacacagaagtatgttcaaatatcattatagtacctcaaatattgtatttataagagttttggacataatatgatatagaaagtaaaatagaagaaaaataaagtttaaatgtcacttgtgtgatttttttaaaaaaattcacgccgcgacggccgcgaaacgttctatttcccgttacaagccgttcccgcgataacgcgaccgttcccgcgaacgcgaccgcgaccgcgttttttttccttgagcgtcacatcttgcaagcttcttcaaaggtgagttatgtgtacaactccaatttctctccaatcccctccgtcctcatttaggcctccaaggaagctacttaaacattgatcttcaagttcatcaattttccaaagaatggataacttctcgaactcctttatgtaatcttcaacggacatattcccttgtttaagagtagaccattccatgtacaagctttgtttgtagttagaaggaacaaaacgtcctcttaacaactttttaagcttatcccaagtagagattttgggtttattagctttcacacgctgcctctttactccatccaaccaaatagatgcatatttggttaccttaagcacggccaccttgtatttcttttcttttggtgtctcttaatcccaagtagagcttttgcgtgtgaaagctaataaacacaaaatctctacttgggataatcttcttcttgtttccgaaacaactaattcttatggtagttaggaaagcaagaatggtttctaattcaatagggaatatattaattattattagtttaagttaaatagtgcacgaatctaaatagattattcgtctcaaaatctcacttaagtatagatttgtttggacatctgagggaagaagaagagagcgagataaaggagaattatcactcaatgaatccatatcccgagttttcccatttacttctttgaaagcaatatagttcacgaggtcttattatcagtctatggacataagagtaataatttaagggcaaaaactatgactttatgggtttaaactgatacatgttctgttaaactgatagatgttctgtgttaaaccgatactcatatattcctggttaaactgatagatatatgatttaaattgatacccgtctcagtcatgtcttggattgagacggtctgacacaagactttttgtgtattatatatctgattagaataaatttatcctgtttactaattattttatcttctccagacacttgttgacacaatatgcaatcagtttggtaaagatgaactcaaactacagtgcaaggtcctttcattgtcctacagtcataaggggatcccttcttcagaaaattgggtcgtgtcttctgtgtcaaaaaattccattgaagatcaacaatatgatgctgtcatcgttaccgtgagttttactttgcttactgctattgcaccaatctttcttcttttgacacactgataatggcaatgctgttgtggtttgaagccatgttatggggttttagggatatttatggagtctgatctaatatgttattggataaaattcagatctgtaacgtgactcaatgagattgaaaaaaattgaatcaagataatggattggaaaattaggagctaacctagggtctataagcgatccacttggagtctcataccaagcaggtattcgacattttaggtttatattgctgctatggctcatatgggagcctacatagggtctggtgcttattcctttttcttttgtctagttttggggctgcacatttctgttgtgttttgatatggatagccatcacctgcaattgcatggaggctgaactaagttctataggggagcaaacagtatctgttggaaatttattttcatattgtgtttttaaatgctataatccaaaatttgttgttcccctaaaatgcctaaaatacccttatgtaactgctccatctgtcccttaatagacttcccatttctccaatgcatgtttgccaatacacattttgtattgttaatatcaaaaattacatattagtaaaaattataaaagtttgattttcctaatgtacgcaatgagacgaatcaaacaagacgccatatgactatgttttttcttatacttcctatgttttttaataagtgacatgttttccttttagggaaatgtcacaataagtgacacatagctcaaagtagtaaaaatacttctcatttattacatctttgccattatttaattgtttcacctacctactttatccaatactcaaatttgattggttgaacaattggtcccaactttctctagactccttggtattccctttcccccactttctctctgtgtcacttattaaaaaatggaggacgtatattggaaaaaaattggaaggttttcttcacttatgaatagtggtaaaattagagatgggaaggctattttgggatggatggagtaatatttaaatttttaaaataatgtcattgttttagtgatgaaataaaattcaaggctattttttctagtaattatgttatctgtacatcaccacacgtatcgcgtgcatataagactagtttgatgatattccaacactgttcgaaggaagtcaggcatggaaccatgtttgcttccatatgggaaatattttgcttactctccttcaaacatctacctcattatcccagaatgattgatcgaatctaatacaaatatacaattgatcatatgccaccagggaattacatcaaattaaatttttatagaaggggaatcagtcatagcctcatagggaacgaataagtgatactcgccagtttctttcctggttacttttcctcttctcactagccatcctttatgtatgggtatgctgcatcattcctgccactggttgggactcccgtttgaactatggggggatgggaaagctaagccatcatcttcaaattgagtttcttgagaatgtaagacaccatctgtaagatgaatatagtgcactctatagtcaatgtcatgatctttatgggtttatctgctgaaataactgtgatatacccagctctccatttacaaagttttcctacatattaaactcttgcccgcaattctagaacttcattgtagaacttttcctacataagcatcatttgtcttttctgtagtaaaagttagaaagagctttattttagaacattcgtttttagttttctttgttgttgattactccgccacttttaatacttttatgattcaagtatttgacaaaatcatgtaatttaggtcctctgctgcatgcagtctataccctctctctctctctctctctctctctctctgtggttgtgtcttacttgttgagttactaactccagccattacataaagtaggctggcattatgatgagcaaattactcaagaccacatgttagctcctttttcttttctccttattctgaaaggcaaatataggtccatcttggtgcttctcatgtcataagtaagctgaccccctccttttccagggaataggacaataatccaaaagtgagggttttacatgttgggatttgtgaagtttcttattttacttaatagccgagtcagtgttacaatacatagtaccgtgttacaaaatagtatgtaacaccaagcatgtttatgtgcaaaattgtgcaagactttgttgctggcacgccaagggctgttttaatgtagtttacttattcttttaggtttttcagatgacaatcataaagggaattaggagtgtttttattgtagtcaatccctattgtgctacaacgataaaagaaaaaagcacaagactagaaggagaagtaatgtctaggaaagactcctcacctggggttgctagtcacctacacatcttagaaggcatcaaaccaaagcttattcccctcgactgttttcgggagaaaagaagacaaaattgtttctaacttatactttaccagtttcactacagcatcagaaagaagcaaaatatgctcccacaacacggcgaacctagctttccagatgtgataaaccagaccagcaaaatgattattttcactagagctttgagtctattttttcggtttttccccttcttcctggtaatgtcacgccaccaagccatcatctcaattttttgagatttgacgtaatcgctcaaatagctgagtaagacacttcttgctctaaatactaataaaaaagaggtgaatgtgggtctcagccatgttactcaaatcggataaagtgtctactcttattagggtttttgggtgttggactcatccatttttttttgtaaaatgtcaagattttggtttgaaatgagagattcaagtgtcgtgacatgagtcggcacgcaacacttaaacgtgtcgaagtaacagagggtctcagacaatcaactttaatcaatcacgaaccccaaaatttatgcaacctttgctcatattcagtctctgtaaagcactcaactgcagcacacccacccattcgcttcacctacagcaggagggcacccaagtaattgctatgatgagcgaattattctgttttgccttgctggaatattgctgttagatttgctgactcactggcagttaattatagtcagagaatgagaaatatcctgtagagagagaaagggtatcttttgtatttagctctataaatagctaaggaagggaagggcattgagagtttatgatattataataggagagatttagcctctcgaatgctgataggagcgtagctcttgttggattatcaatactactctgtttgctctatctatttctactcaggttccttcttgtacagtggatccctgattggatttacttcatcaaccagcagataaaattatttgtaggcacattgaaaccattccaaacctaatgaggccaaagtttatcacaaagaatataggagccaaatgtaggcaacagataagagtataattgccagaagttgaagactccaggtattgttcagaaaccttaatgcatatcatcattctgacactagattttccccggagccaactaacaaaaatgaattaaagagattaaggctatgtttagttcacctgaaattttctgatctgaacttatctgatctgatctgaacttattttttctgatctgatctgatctgatctgaaccaatctgattacaagatcttatcttttagatttttctcaatatataagaaaaaatatagtcatgtggggtcttgtttgattcgtctcaatgagtactttattaatattcaattattataatttttactaatatgtaatgaaagatataatgatttttaaatataagcatgatctgaactgatctgatgtgaacttattttttctgatctgatctgatctgattagatctgaaataagcaaaaataaggtgaactgaacatagcctaagcaacaattgagggaaaataagatcattatggctaagataagataaatatgtaatgataaaatcagagtaattatatcagttacactctcaacattcgtcagattgaggtttcctcccaaaatgccaacccacttttctgtattttcacgtccttctctctacccttctaggtatatattacatcagctgtaaaatttttgaaccaactagtagaatactgatctaccctcaactgcctcactttctcattttttctgggcctttttctctctagcacaagtccacataagtgatgcatagcagaaatataattccactagtcatcctcaatattgatataacaaacacatcacccacatattatcatttttaatcgctgcatgcgaggcatacttacccaccaatcaggatatgcataacagcgttcctaattccaaaaccaccatatatcttgggtttgcaactctcatccctagcaacaaggggactttctgaaaaagtggcagattccgcccacaagtagtttgtacggacacctttattatattattaatatcatatttcggcaacacaaattaccagcccagtaaaacatgaattgacatgagactaacaaggggcccaatctaatatcgtacgtctgtactaagcaatgtataaaaaaaagctcaaggtgcattgatgcaatagggatcctaatgtgcataggtgcgcctcattgaagtgaggcaccactaaggataaataaaaaagattgatgtaaaattaaattgtgcaccttgggtgcgcctcgatgaactttttttgtgtgcctaagtgtacctcaagtacgcctcattgatatcgcctcgcctggcagaaaacgagcttgaccccaatcgccttgctccccaccgcctaggcgtgcctcagtcacactttttaaatacattggtattaagtactcagaatggcaaaaagaaactttgggcattaattagacatttcactttttgtgcaactatttgtgacttcagagattgatatgttttctacattacagacttttgtgatggctgcatggtctccactgtcaaagaacattagtttaagtagaagaaatattgctctattaccttcctccctctacaaacaaaatcctaaaatgtggttatgtagtgccaattcaaacttgtagatgcatgactaatgctttcattatgctgtgggtttttatactatgattcatgtccaattacataacaattagctggagtcaggatatgtcacggaaattttaagcctggcaggatgattgtttatattttctctttttcggtgtttaagtcaaagtaaacttctaggctgctcttttataggctagttgggctgttggggagatctacacattaagtgtgaagaaatcttgtctaactccagtttggttgagaactgtaagctgtcataacatttgttgcatgatgaggccttgtgggattatcatgttagctgtaaactctaaacttacttgaaatctagtgttgtgtctccttatttctgtagtcaaaattgaaccttctgtacgtttttgatacctgcgactagaatgatggaattctgaattactgatactattacaaccatctgctaagaacgaagatgactcttagctaatttctcagcagatttagagaaattaagaagaattactaatgaatatttaaagagaaaactaccaagatatgattgtattgatgaaaaacaccaattacaacctaaccaacattcgagaggttggagctctcccaagtaaccatttctctcactaaacttatcaattttcaagatgccttttccattctcagttcctctatatttatactactccccttagcaaactacccaacttattccccaagtaaactaaagagataatatctaaaatacccttccccctacaataatattagttcttagcattaccggccccctaaacttccaccttgtcctcaaggtgggtcgtaatcatcactaaattctgggcctctactcgtatattcagtgtcttgcagcccttcaggccccaagcctaggttatgcagctcgtgttgcggctcctcctcatatagttctctggctggagtgagtgcctcaactataatgaaaaagtcctggaggtggggaaggaaggagtgtctgaaatggtgtggtgtgctgctggtgttatgggcttgtgcctgaaagttttgggtttaaagagatggagtggagaagagtggagaagtgactggagacgtaaaagaaggaatcataatttttgtaagtggtgggttgaaaaagttggtgggaagaattgtttttataaaatgtagtgtaatggtcgaaaaatgggtggagtaagtatggtttttggctggggatgtggtactgggttgaaaataaataggtctgagcttacttgtaaaattggcctcaacatgagcaggcccaatatcttgagccaattccccaaaagctggcaatagagcactcttaattgcattgttgtgggccatcgggctccaaacatatattcggaggagccggacttctttggtgatgtcattagcttggcccattgcacactttcccttaacagcctcaagatcttttcccacttttgtaccccaaccacgtggcttcaccatcctttctttcttgcttttgtcacttttttggcaatatacgagtttgtccttactaccctcatcttctaatgttggcttcctcaccaagcttaatttctggaattttgtccaccaaatcccaccacccatcgtcaacaccatacctatctacaccggccaagaagcctggtcctccacccgaattttcgccacagacaaagcctgaacaaccgtcagttctctcaccggagaagttcacaggtccaccacctgacccactagttgctgatccacccttcacaaatctccctcctctggctgccacaagtagtggttcctccgtaatactcatatttctcgtccaagagccctggaccaccaccggacccacttccaccggcaccaacttgttcaaatgatacttctctttcttttccaaacagcctacttggactggaaaaaccactgcgattgtagcctccgccagatctgtagcctagtgcacctaacgtgcttccaactgcaacccaatagggatggaaatggatgggattcggggagggtggagcatcacccgcatccgtcacccgcatccattcgctccacccgctccacccgcatccatccatccgtcacccacgggtgaaacgggtgggtcggtgataaacgggtggaaccatttagggggtgtttggtatcatgtttttttacaaaagaaacagaatcaagtaacaaaatccgtttctacttgtttggttctatgttgctcagactcgagtacccatgtccgacacgggtacgtgtccaagtgtccaactcagctattttctagaattttttatattttttaacccaaaacaaagtgtccaagtgtcccacccatgtccgactcccgaggatccgacacgggtacttgaggtgaaatgaagagtccgagcaacggaggtttggttagtgtgtaaagtaacaattaccgttacttgaggaaaacacatccccccaagttgtttccattcaaaaacctaaggaaacaaataacgtttcactcctcaaacaagaggaaagggaatgggttatatttatttccattccattaggataccaaacaactaataagggtaacacttattattatcctttcccctccttatcaaaatcctttccattccgtttacggtattcataccaaacacccccttagtatattttctaatgaaatttgtgatatgatatgcatgatataaaataattctatcaaaaatataaaaagtaagtaaacttacatgtacaacttaatagatgggtgatgggttggaggttaaacgagtgatggatcgggtgacgggtgaagaaattctcacccaccactcgctttccatccatttaaattaggtttttcatccatttaaaaaaccgggttaaacaggtgatgtatgatccatcacccatttccatcctcaaacacatcccgatttgtttactgcaccaccagatccaccagtataaccacccgaaaaatcatcatgccttctactagccttgtaacctgctcccggtgagaagcttcttccacaagtggtggtcgctggacctccatctccttcttccccaaaaaattttccatgacacccactcgacccttcatctgtgacaacctcttcttcgtccacctctgaagttttggggtcgtcttcctcctcaagctcctcttgaagtaactttaacttccgttggatgggagagaacgcttcattgattatcttcaccagatcttcttgaagtttctcgaaactttttctcacgttttcctctacctctttcgtgatttcctttccgatctccttcatttttagactaggagctcttgcgattccatggcagatttctttttttaaaacaagaaaatcaggcacttaatctcccagaatagtggtgctctgataccattttctaagaaccaagatgactcttagctaatttctcagcataacaacaaatttagagaaattaagaagaattactaatgaatatttaaagagaaaactactaagatatgattgtattgatgaaaaacaccgattacaacctaaccaagaggttggagctctcccaagtaaccatttctctcactaaacttatcaattttcaagatgccgtttactactccccttagcaaactacccaacttattccccaataaactaaagagataatatctaaaatacccttccccctacaatattagttcttagcaccatcaaactgggatggatggttttgtaaggttccaatttacttctccatcaaaatattttaggattttttatctcatgtattttagagtttcctcgtccctttttatctgataagattcttctgatgatttgattttatggtaggctccaatcagcaatattaaagaactgaagattctgaaagctggagttccattttcacttgacttcattccagaggtttgtatttttatagtggttagacatgcttcccctagttttcaaagtaaaagcatccttgttgtgacgatattttttcccttgtttttgtttttattattatcatcacttatttccattttctattttccatgctgataagatgttcatcaccataatcttgtggtatcagaagtgtttagtggagtttattcactacacatgcagttgttcttttgccatgaccgccattcattttctcgtcaaaacaaatctatgaagtttggttttcagactcatggttcttgtagctcttgtgaatttttttttcttctccttgcatgcattcttcaaattacatattgcatataccaggtgctctcctttattttatatttaatttttaaaattctatcatatattttttaatgtcaaacctcaaactaggggttcactgcatcttaggcttaccaggctaatatttctttacttaaccttttccctttatatttgctatcctcttgtgtagtaatcaccataagaagggtacaaactaaattaccctcccattcttttgtatcattctgaaatagtgtcacagagctttgatttttttgccctcatttaatctggcaaatgttctctctatttttttttttttactttcttttgacgggattctcaggcaattgttacggggagcagccagtcacactgtttctgtttattatgcaggtgagttacctgcccctctctgttatgattactgcgtttaagaagaccagcgttacaagacctcttgagggcttcggagttcttatcccttcgaatgagcaacataatggactgaagactctcggtaattgtctggttcacgtgtgtagcgaatcagattttcaaaccctgatttcgtaacattgcaggtactctgttttcatctatgatgtttccagatcgtgctttctccgatatgtatctctatactaccctngttggaggaagcagaaatagagaacttgcaaaagcttcaacgtatgagatatgcaatgttttaaatgtatgctatagtcatcgtttcaaccttttggtgcctttttcttactaatttatcctcctggtttaatgatcttagggatgaattggagcaaatagtttcgtctgatctccaccagctgttgggcactgagggaaaacctacttttgtgaagtattgatatctttcacccaacttaacatgatttgtgcttataatatgttaaataaagtaactgaaatcctgaaattaagactacgaaactgtatggtgacagtcatttttactggaacaatgcattccctttatatgggcacaattacgactcagttctgagagcaatagaaaagatggaaagagatcttcctggacttttttacgcaggtaatctgtcatttgcttgttgcgataaagttcatgtacagttggcatatcaatcaacttgcattctttcttgctaactccaaacaatcaggatcattaacttgtaggctgcagcaacagagagtatctcccaagttgttaggtttcatgtaacctcgtcgctgagatgaaatttccgttggctaaaaagtgaaagttttgtattgatgttacccaaaacaaaagtattttgcatgttgcttgaagttttggttgtttcagatagtacatcctttgacatgaaaataaatggaaaagcgtatgtcaagcaattatcatctagtttctttgtttctagatactagccgcatttgatcccagatcatttttgaggaagtcagctgaaataccgtagctatccttcagttttcataataaaactttaatggatctgatgtacagtaatttagtgtgcaccgggttaataattgatattaacttcatatagtgagtcttataaagatataatgaacttatatacaatatagtggattttattaatggaaaacatatagtgaaactatatgcaatatagtatgatacataaagacttagacaacaagagcattcgaaattacaaagaacaaaggaaagaacaattgtatcaaaccggttcgaatgaacaaacaaccaccacttccacaatcaatgtaccaccaatcaagactaaactataacaatgagcttctagtttaagtctactttgagttttaatcaccaattcaacgattagatgatcaaaattgcaaaggttaagagttggtcaaacctaaccaagagttacactaggcacatagctttgttaggagtatattagtttatgaattctagttaagttagaaatccaatacctagttggattaggattcctaattggattagaattatagtttagttagaattctagtaatagtaggcgtgtgattaggagatataattagcttaattcttatattgttagtttaattcttatcctcgttttaggtttatctttagtcgaacttgtaccctatataaggggcctttatttcattaataatatagtttattttgagtttaaacctttacttgtgattgtttgcttgagaggttattaatcgaaccattaataacttttcaggattgttaagtttttagtgttaaacatcttaatttcaggagtgattttaagagtgtttagattcttgtattcaagtttcaggactgatcttgaatcaagaaatatccctagtttcgactaatatcataagtagttcgaattcttggagtcttttcttcaagattcatattcataacttgattatttagacttcttggttttgtaatcatatcaagtggtatcagttttccagggaggagaggatacaaagggttctctttgatcaaagaagatccaagggcatcaataagaatgacacttgcaataagttcgagtgatacaaacaacttcaagactcgatcttttgctaccaagaaccaatcttgacgcctgaagattgttaggacaaaggataagaagtgtttctacatccaagattgcattctttacgtccaagattgcgtcaagatccattctttaagttcaagaaaggagtagaaagcattcgaacactacttaaacatgacatccgagatggataagctggctatggccatgagtgccttggcacaatcacaaactgagtcacgcaaccacatgggtaggatggaggcacgtgaccgtggattgaaactagatgactatagtggagatggcaatccagaagacttgttggagtggatttgccaactaggcaaagtgagtgattataggggctttgatcacaagaagagattcaaggttgcttccattaggctcacgaagtatgctggaatacggctcgaaggattgcatgcacaaacttcttgcctaatgactatgaacaaaaacagttcataaggctcgcatcaataagccaaaacacacttagtgtacacgaatacagcatggagtttgacaaattagggcttatatgtgacatagaagagaaagagcaatacaagattgcaatgtacattaaagggttgaatcgatatatagccaagaagatcgaagtctcaacttatcacttctttgaggatgtgactaaattggctaagaaattcgaagagcatgacaaagaagaagggcctaagagttcttacacacctaagtatgactctagtgctaaagggaaatcaacagttccctactcaaggtggtcggaaagacctaagaaccccactacacctaaggaggacactagcatggagaagacaaaagtggccgtacctaaggagagtttaattttgtgttttatacatctttgcttaagagcttaacaattgaaactattaataacttttcaggatggttaagtttttagtgttaaacatcttaatttcaggagtgattttaagagtatttagattcttgtattcaagtttcaggagtgatcttgaatcaagaaatatccccttgttcaactattataattgatcttattcgagttcttggagttaatttcttcaagattcatattcatacttgattattagacttcttggtttagtaatcatatcaatatcattagcattaatttacccccagggagattaagaaaggattagcctaatcaaggcgcttaagaagtttttaggaaaaatcgtgcttgttaagcttaagaattgaacttctttcaccatttgcccttgattctcttgttgaactagaagatcttggttcatagtagatgctcctgcatcatagtagagcatttaattttaattttttaacatgcacgaagatgtaggtagtgtagtatatatcgtgagacgtggtttaacatatagaaagatgtagtttctgcatgatatagtgagtttttgcatgatatagtgaatgtctgaatgatacagtggatcgttccgaattgttgtagtttgtatgatatagtatttttgtgaatgatatagtgagtttcttcatgatacaatgggtttctgaatgatatagtggattgcttagaaatgatatagtgagcttttgtatcatgtagtaggtttctatgtgatataggttgttaaaagatgatacatgcttttggcctcatgtactctaatgttaacgtgaacccggtccttgcaagtcaattgcagttttttcaatattaagctatttttttttttttttttttttttttttttttttttttgtacgggaatatttagcatctttaccacaaacataaccatacgaatattatgcggaaattccagtctgaagtcttaacttttcaaaattaaaagcttctatattatttttggaatgaaaaaaaatgagctatggcatgttattttgaaatacaatgagtctcaaggtgcatagtggcttcaattctacgaataatgaatggactactgatttctaattttttgttccgggcttttgcattaggtaaccataaagatggactctctgtgggaagaactatttcctctggatacaaagctgcggagcttgtgatatcctatctcaactctacttaagatgcctaaatgatcgaggagactccgtaagtcctttctctgattctatctttgaactgagtggaaacacgactgtggtctaaagtagttgatgtctcagatatccagaaatggcgttagtgatattcaggagctgtccattgaccctttgattcattgttgcagtttactgaaagttgttagctggtctcagaaaaacgaaaggaaaaaagggggaaaacaaaaacaaagaaacgtagattgtggtgttaaaatcaagaattccagagatttgtaccttctttatcagttgaattgtttacagtgtgaatcaagaagttagctcgaccttcttttcttgtgaatggtaagatttcgtgatcatcaatacttgattgtgctgtttgcaacttcaacggtaagatttcctgatcttacagtttaattgcttgtgctgtttgccactt

SEQ ID NO: 32 - DNA, 1575 bp, synthetic construct
  misc_feature 1..1575: note = F420L mutated Beta vulgaris PPO2
  variation 1260: note = n is any nucleotide
  source 1..1575: mol_type = other DNA
atggtaatgctatacgattctcacctctcaggagtctcaactcatcttcaactatcgcaggcatttcccaggaagaacccattaatggccaaagtgtctgagccgggtaaacccacttctgctaaaaggattgctgttgttggtgctggtgttagtggacttgctgccgcatataagctaaagtcccatggcttgagtgtgacattgtttgaagctgatactagagctggaggaaaactcaaaactgttgcaaaggatggtttgatttgggatgagggggcaaatactatgatagagagtgaagcggaggtcacgagtttactcgatgatcttgggcttcgtgagaagcagcagtttccaattgcacaaaacaaaagatacattgcgagagacggtcgtcctgtgctgataccttcgagtcccattgcacttctcaagagcaatatcctttcagcgcaatctaagctacaacttatgttggagccattcctttggagaaaacgctatgcttctaagatttctgatgagcatgctcaggaaagtgtgggtgagttttttgagcgacattttgggaaagagtttgttgattatctaattgatccttttgtcgcgggtacaagtggaggagatcctcagtctctttctatgcgtcatgcatttccagaagtatggaatattgagaacaagtttggctcactaatttccggattaattcaatctaaactgtctccaaagaaggaaaagggtggaggaggaaagccttcttctaatgaaaagacacgcatacgtggttcgttttctttccagggtggaatgcagacacttgttgacacaatatgcaatcagtttggtaaagatgaactcaaactacagtgcaaggtcctttcattgtcctacagtcataaggggatcccttcttcagaaaattgggtcgtgtcttctgtgtcaaaaaattccattgaagatcaacaatatgatgctgtcatcgttaccgctccaatcagcaatattaaagaactgaagattctgaaagctggagttccattttcacttgacttcattccagaggtgagttacctgcccctctctgttatgattactgcgtttaagaagaccagcgttacaagacctcttgagggcttcggagttcttatcccttcgaatgagcaacataatggactgaagactctcggtactctgttttcatctatgatgtttccagatcgtgctttctccgatatgtatctctatactaccctngttggaggaagcagaaatagagaacttgcaaaagcttcaacggatgaattggagcaaatagtttcgtctgatctccaccagctgttgggcactgagggaaaacctacttttgtgaatcatttttactggaacaatgcattccctttatatgggcacaattacgactcagttctgagagcaatagaaaagatggaaagagatcttcctggacttttttacgcaggtaaccataaagatggactctctgtgggaagaactatttcctctggatacaaagctgcggagcttgtgatatcctatctcaactctacttaa

SEQ ID NO: 33 - protein, 524 aa, synthetic construct
  REGION 1..524: note = F420L mutant protein of Beta vulgaris PPO2
MVMLYDSHLSGVSTHLQLSQAFPRKNPLMAKVSEPGKPTSAKRIAVVGAGVSGLAAAYKLKSHGLSVTLFEADTRAGGKLKTVAKDGLIWDEGANTMIESEAEVTSLLDDLGLREKQQFPIAQNKRYIARDGRPVLIPSSPIALLKSNILSAQSKLQLMLEPFLWRKRYASKISDEHAQESVGEFFERHFGKEFVDYLIDPFVAGTSGGDPQSLSMRHAFPEVWNIENKFGSLISGLIQSKLSPKKEKGGGGKPSSNEKTRIRGSFSFQGGMQTLVDTICNQFGKDELKLQCKVLSLSYSHKGIPSSENWVVSSVSKNSIEDQQYDAVIVTAPISNIKELKILKAGVPFSLDFIPEVSYLPLSVMITAFKKTSVTRPLEGFGVLIPSNEQHNGLKTLGTLFSSMMFPDRAFSDMYLYTTLVGGSRNRELAKASTDELEQIVSSDLHQLLGTEGKPTFVNHFYWNNAFPLYGHNYDSVLRAIEKMERDLPGLFYAGNHKDGLSVGRTISSGYKAAELVISYLNST

SEQ ID NO: 34 - DNA, 4272 bp, synthetic construct
  misc_feature 1..4272: note = codon optimized Cpf1
  source 1..4272: mol_type = other DNA
atggattacaaggaccacgacggggattacaaggaccacgacattgattacaaggatgatgatgacaagatggctccgaagaagaagaggaaggttggcatccacggggtgccagctgctgacaagaagtactcgatcggcctcgatattgggactaactctgttggctgggccgtgatcaccgacgagtacaaggtgccctcaaagaagttcaaggtcctgggcaacaccgatcggcattccatcaagaagaatctcattggcgctctcctgttcgacagcggcgagacggctgaggctacgcggctcaagcgcaccgcccgcaggcggtacacgcgcaggaagaatcgcatctgctacctgcaggagattttctccaacgagatggcgaaggttgacgattctttcttccacaggctggaggagtcattcctcgtggaggaggataagaagcacgagcggcatccaatcttcggcaacattgtcgacgaggttgcctaccacgagaagtaccctacgatctaccatctgcggaagaagctcgtggactccacagataaggcggacctccgcctgatctacctcgctctggcccacatgattaagttcaggggccatttcctgatcgagggggatctcaacccggacaatagcgatgttgacaagctgttcatccagctcgtgcagacgtacaaccagctcttcgaggagaaccccattaatgcgtcaggcgtcgacgcgaaggctatcctgtccgctaggctctcgaagtctcggcgcctcgagaacctgatcgcccagctgccgggcgagaagaagaacggcctgttcgggaatctcattgcgctcagcctggggctcacgcccaacttcaagtcgaatttcgatctcgctgaggacgccaagctgcagctctccaaggacacatacgacgatgacctggataacctcctggcccagatcggcgatcagtacgcggacctgttcctcgctgccaagaatctgtcggacgccatcctcctgtctgatattctcagggtgaacaccgagattacgaaggctccgctctcagcctccatgatcaagcgctacgacgagcaccatcaggatctgaccctcctgaaggcgctggtcaggcagcagctccccgagaagtacaaggagatcttcttcgatcagtcgaagaacggctacgctgggtacattgacggcggggcctctcaggaggagttctacaagttcatcaagccgattctggagaagatggacggcacggaggagctgctggtgaagctcaatcgcgaggacctcctgaggaagcagcggacattcgataacggcagcatcccacaccagattcatctcggggagctgcacgctatcctgaggaggcaggaggacttctaccctttcctcaaggataaccgcgagaagatcgagaagattctgactttcaggatcccgtactacgtcggcccactcgctaggggcaactcccgcttcgcttggatgacccgcaagtcagaggagacgatcacgccgtggaacttcgaggaggtggtcgacaagggcgctagcgctcagtcgttcatcgagaggatgacgaatttcgacaagaacctgccaaatgagaaggtgctccctaagcactcgctcctgtacgagtacttcacagtctacaacgagctgactaaggtgaagtatgtgaccgagggcatgaggaagccggctttcctgtctggggagcagaagaaggccatcgtggacctcctgttcaagaccaaccggaaggtcacggttaagcagctcaaggaggactacttcaagaagattgagtgcttcgattcggtcgagatctctggcgttgaggaccgcttcaacgcctccctggggacctaccacgatctcctgaagatcattaaggataaggacttcctggacaacgaggagaatgaggatatcctcgaggacattgtgctgacactcactctgttcgaggaccgggagatgatcgaggagcgcctgaagacttacgcccatctcttcgatgacaaggtcatgaagcagctcaagaggaggaggtacaccggctgggggaggctgagcaggaagctcatcaacggcattcgggacaagcagtccgggaagacgatcctcgacttcctgaagagcgatggcttcgcgaaccgcaatttcatgcagctgattcacgatgacagcctcacattcaaggaggatatccagaaggctcaggtgagcggccagggggactcgctgcacgagcatatcgcgaacctcgctggctcgccagctatcaagaaggggattctgcagaccgtgaaggttgtggacgagctggtgaaggtcatgggcaggcacaagcctgagaacatcgtcattgagatggcccgggagaatcagaccacgcagaagggccagaagaactcacgcgagaggatgaagaggatcgaggagggcattaaggagctggggtcccagatcctcaaggagcacccggtggagaacacgcagctgcagaatgagaagctctacctgtactacctccagaatggccgcgatatgtatgtggaccaggagctggatattaacaggctcagcgattacgacgtcgatcatatcgttccacagtcattcctgaaggatgactccattgacaacaaggtcctcaccaggtcggacaagaaccggggcaagtctgataatgttccttcagaggaggtcgttaagaagatgaagaactactggcgccagctcctgaatgccaagctgatcacgcagcggaagttcgataacctcacaaaggctgagaggggcgggctctctgagctggacaaggcgggcttcatcaagaggcagctggtcgagacacggcagatcactaagcacgttgcgcagattctcgactcacggatgaacactaagtacgatgagaatgacaagctgatccgcgaggtgaaggtcatcaccctgaagtcaaagctcgtctccgacttcaggaaggatttccagttctacaaggttcgggagatcaacaattaccaccatgcccatgacgcgtacctgaacgcggtggtcggcacagctctgatcaagaagtacccaaagctcgagagcgagttcgtgtacggggactacaaggtttacgatgtgaggaagatgatcgccaagtcggagcaggagattggcaaggctaccgccaagtacttcttctactctaacattatgaatttcttcaagacagagatcactctggccaatggcgagatccggaagcgccccctcatcgagacgaacggcgagacgggggagatcgtgtgggacaagggcagggatttcgcgaccgtcaggaaggttctctccatgccacaagtgaatatcgtcaagaagacagaggtccagactggcgggttctctaaggagtcaattctgcctaagcggaacagcgacaagctcatcgcccgcaagaaggactgggatccgaagaagtacggcgggttcgacagccccactgtggcctactcggtcctggttgtggcgaaggttgagaagggcaagtccaagaagctcaagagcgtgaaggagctgctggggatcacgattatggagcgctccagcttcgagaagaacccgatcgatttcctggaggcgaagggctacaaggaggtgaagaaggacctgatcattaagctccccaagtactcactcttcgagctggagaacggcaggaagcggatgctggcttccgctggcgagctgcagaaggggaacgagctggctctgccgtccaagtatgtgaacttcctctacctggcctcccactacgagaagctcaagggcagccccgaggacaacgagcagaagcagctgttcgtcgagcagcacaagcattacctcgacgagatcattgagcagatttccgagttctccaagcgcgtgatcctggccgacgcgaatctggataaggtcctctccgcgtacaacaagcaccgcgacaagccaatcagggagcaggctgagaatatcattcatctcttcaccctgacgaacctcggcgcccctgctgctttcaagtacttcgacacaactatcgatcgcaagaggtacacaagcactaaggaggtcctggacgcgaccctcatccaccagtcgattaccggcctctacgagacgcgcatcgacctgtctcagctcgggggcgacaagcggccagcggcgacgaagaaggcggggcaggcgaagaagaagaagtga

SEQ ID NO: 35 - DNA, 37009 bp, synthetic construct
  misc_feature 1..37009: note = L397E mutated Beta vulgaris PPO2
  source 1..37009: mol_type = other DNA
tattccatcgaatgtagcaaattgactgtccgttgcaatttcggagtttccactcgtcgcatggtaaatggtaatgctatacgattctcacctctcaggagtctcaactcatcttcaactatcgcaggcatttcccaggaagaacccattaatggccaaagtgtctgagccgggtaaacccagtaagtcaaacattcgaatcacaactcaagcaaatttgtcttgtttgcgttatattttgctcatttcagccttttttgtttttccgacctttgcatactgaatattgtgtgtgtgtgtgtgtggggtttcagcttctgctaaaaggattgctgttgttggtgctggtgttaggtaaattttcgtctcttgcagagtttttgagtcatttgggaattctatgtgaaacttgtaactcccttcagtccaacgaacgcagtacaattttctatcaaatcatggtcctaatttccaattttccatatatattgttggaattatattgggattgtctatcactattaatagtattaggatcaattgtagagaagcacagaaatttttgggatcgaaagaatatctggattgccacattaacagcagatataattcttccaattggtttttggttcttcctaccttgacttgtctggtcaaacattataaactttaacctttaatatccattaaagtaaactataggatttttttgtctaaaacatgcttatataacatgaaatttgtgagaaaccaccttatatatatttttttgcgaaaacaaaccttaaacaaaattattatcgtgagaacaaaccttatgccaatttcgatcattgacccaaggttttggcattgaccgtgtcatgaattttgttgggtttaaaaagtcatgtgtcttgcatacgaaatggtaaatgcgggaaccttgggtcaatgtttggaatccgcataaggtttgttctcccaaaaaatgtttttgttcaaggtttgtttttgcaaaaaaacttatataaggtgctttctcagaaatttcatgttttataaagtagtatttgacaaaaaaccctaaaatatattatagaattattattgactaaattgtgtaaaaatgtactcttctaaaagtacattatagtattttagtggaacatttgcgagaaactactttataaatacgatttttgcgagaaatttcctaataaaaaaatgtgaagtgcaaaactatcttattgataattttctactccctcaaatccaaaatactatgaagtctttcctttctggtttgtcccagattagtttgtacgcttccatctttggtatgatcccacttttattatacttattagttttacgtgagttccttactctatctcttttaacaaaaatactcaactatctctatccaataaaaagttccttactagtcctatcacatctgctttttaataaaataacgtttgataaccacacaacttatatccttaaaatacacgttcaaccaagtgttgagattaatttggacggagggaataaatattttttgaggcatattggtagcagtattcggattccgataggttgactatgtttccaatgttgaccaacacttgccttgcatgtaattctaactttgctcttttttattcttcatttccctcgtattccatatacaatgtttagagacccattccttcctcttctcttctttcccttccttactatgctttgccataatcttcctcaaatgagtgcaaattaatttgtcgttgatgtaggccaactgattgtagcacatcttcatagttcatacctcaacacactcgtaattatattataccctacatgttaaatggctcatgaagctttattttatatcatacttcctccgtttcacaataagtgtaacacttttcttatttggaataatcacaataagtgaaaccaagctccaaatggtaagaaaagttcactcttattacaaatataccaccaaaaagtaagaggggatcacaacttcaatacttcttcactctactttattgtggtcccaactttctctctctaaattccttggtaactccccactttctctatgtttcacttatggtgaaatggaggaagtattttgtagtggtatttagctactaggccttggatgatatacaatcatacaatgtatttatattcacgataatttgctgcccaccttgattaccatgatttccaccaattttatcaatttcagtacttcaccaccccgaatttatattttttatttccaaccttggtatctccatttgtctgagtgcccgatccatttgtatcgcctccagaattgaagaagcttcctgcagctagacaattaggaaggttaaaaaagtttggagatggtggaggatagccataataatcattgttgggaggtggaacttggaaggttattgtagggttgaagtccttgatgaagaagaattgagttcaaatgagaggaaaaaggagcagggaagagggacaataagaaaaaaaagggtaaactaaaatcacgtgtaaggcatgtgcagatcaacatcagaaagcatagtcaacctactggtattagggcactgatacctttttgggtcaaaatttttttacaaggtatttcatgaggtagttttgtccatttttttttttacaaggtatcgtctcattttttttttatcatttagtttctcgcaataagtgtatttcatgaggtagttttttccaaaatttcctcatttattataaaatacctcatcttttccataaataatgcaatgtctagacttttacgctgtttacacatgctcctttgaccatctattgacacacaaggaaaaatagagtagagtcatgcaggatcttgttagatttttctcgatatatactttcaaaagatcaatttttttataattttttttttgaggggattttttttttataattatgtacttatcaaaggtcaaagttgtgcaccgggaagcataaaactctatgtgttgcaatttacatggaaggggaggagtataataagagaaaattatggtaaaaggttcattcctggagatcatgagaaaggaagtagaaagaacaaaaaagaacaatgggagtgcttttcaatgtttgttgtacgtagcatttattcatttgctataatgttttgtgacattgtagtggacttgctgccgcatataagctaaagtcccatggcttgagtgtgacattgtttgaagctgatactagagctggaggaaaactcaaaactgttgcaaaggatggtttgatttgggatgagggggcaaatactatggtaatgtttttgattattgcaggtcttgcactttagcgcacaattaatttctggatttttttttgtactgtggtggttatggtcatcaacatgtctcacccactgtgcttgcagatagagagtgaagcggaggtcacgagtttactcgatgatcttgggcttcgtgagaagcagcagtttgtaagtctttcattatctgaatggcacatactttatttcgaaagattgtaattgccttttctttctagatggcttcatcttcatgttgctttctgattcagtttcgtggctaactttccaagtttgtctgattgctaactctgtcatagccaattgcacaaaacaaaagatacattgcgagagacggtcgtcctgtgctggtaagtttgcttgttttacttttgacctcttttaagatctttcaactctggagcctggaaacatggtgatgcaggaggcaagttctctctattttacatcctttcttctctgtatcttatgacatttgcctcttattctgtgcagataccttcgagtcccattgcacttctcaagagcaatatcctttcagcgcaatctaaggtcgttttatgttaagacatacttgatgctgagagtttattgaattcttaaccttcttcttattttttttttatttttttagcaaaaggtaagtatattgcatttaccaaaaaacagtatgtacaccaccacagcagccatgtcagaatctagaaataccaccgaaaaaatcctacacccaaccagagacagttatattatatcctactcctaagtttctgtacccaatttacatcaatattggtccatttacaagatatttttataattcacagaagcacatcagttttaattagtttaataatgacctctggatgaataaccaactcagaccatatagccttattcctggctttccggaagttgtacgccagagcagcaagcacagcaatgcaaacctgtttcttatacctccttttatgtgtcttagcccatctcttatagctagtgaagatacagtcgtgtgcacaggattgaaccccaatccaactagcgaaagcctcacaacattatgactataaatacatctgaagtataaatgctgcacctttttctcctcttgcctgcacggtatcagaacaaatcccagctttagctaacaattccctggttttcagtttattcaatgccatcatgcaagcaatgaaagaatgttttggaacattcagtttgttccaaacacagtgagagcaagggacctttcctgcagttccacttagccacttatatccctgactaatagtatgactctttgcaccgtaaattgatttcaacttaactttttcataagcagtgaattgtgtgttgttagagtgtctagctgtctaggagattgggagaaaaggagggaccaaggagatagaaacacacctttgtgtttctttgtgtatttactttttagggtgggtcacgttttctgagaaatttgggaaaaggaagaaatagtaacacactttcccatttgtataacctgtatactggagctccaatataatttgcatttttttttgagctgcaagaatatgttgacaaacagttattgcttcttcctcagctacaacttatgttggagccattcctttggagaaaacgctatgcttctaagatttctgatgagcatgctcaggaaaggtaatgtcaagacatgtgttacctcgccttaattttcgttccaggaggtgagcatgcatttagaactaaaaggcacaaagactgttggtggtcttgcctgttcaaatataatggagaggagttttcgctacatttaccctctcttgaagtggggttgaaatatagcatcaagttgaatgcttgattaagtttaaaggacttgtgtaactctttttctgtttactgtgattacatgacctggttgattaacataatggtctgtttatctgtagtgtgggtgagttttttgagcgacattttgggaaagaggtaatggtttaccatagtatttctgctttagtggtaaattgtaatgttgctgataattatacttcgctgcagtttgttgattatctaattgatccttttgtcgcgggtacaagtggaggagatcctcagtctctttctgtaagtgaacattttgtgcttcactcccaattttttggaggctggaaatagattcttttccagttgttctgtcaaaaatagatgtagctttattttgaatttgaagttcccaattgttcattttgactattactgattattgctaagagtggcattatgctattatgctcctaaaagaaaggtgaattttgacctacatatagtataatgtatcaatattggtttaattgtttgttcttttgttccttttggtgctcatcttgcgccttgttctcatcgctcgttttttcatgttgcacttgatttaaatttgctcagcttaacttgtctttttgaatttatattacttattgctatattttactaatttcgttgaaactaattttttgctgaacttttcgttttgttgaaatcatttttctgaattaacttgattttcctgaatagaattgaattttggtgatcttaccttttctgcagccttttatttctttcttgtcctttttccaatctcatttttttatatttccattgtgttgacatcttatcattaactgtgcagatgcgtcatgcatttccagaagtatggaatattgagaacaagtatggaccataagacgtttattttaatcgacatgtatgtttcttagtttatacatatattaattctgtggtaaaaaaaccgaacaagaatatctttttttttttctatcatcaaaaagggtgaatatatgtagaggaaaaagatttgaatcaagatattagcctaaagcaataataatgttagtaatagctttaataacaaattcaaaacgtacattaatgaaccgagaggccggaaaatagttaaagtgaccactaagagaagcgaaggattcatgatgggttttcaacccagtagggcaaatttgttcaatgttctttacaaatcaagcttattaccttgtgggtgtttttgctagagatgaatgatagaattttccctagttggaagtcttttttggttactttatgggagctagtgatgtaatttgtttcgccttatggcatttcctaacatgtgcttttgtgatgtattgaagctttttttttgccttaatttatgctggattttaattttgttctttgtttcatttttcttgcttttgaaaaaaatatatagatatgtatatattaggattggtcgaggattttgagggaagggaaagacctaagaaaacttggatgagggtgattgatagtgatatgagtctatttgggatcgaagaaaatattcctttggataaggtgtagtggagggttgagggagcaaatttatgcagattagcttgacttaaagtttttctttttgattatttttcatttacttgtgttttgcaaacatttactcatgaatgatgtaaacttcttcaaccaaatctctggaaaaaaataatctacatggaaaaaacattattaatgttaacttgacagagatcccatccttgtgaagcagctagcaattaggcatctaacaattgacattttaatggacaggatagaatgtctcttgatagtcaataccctctgtttcattgtatcccatagctactaatctagtttgtatctttccaaagaaccattattttgaagtttcaccttgaacacccattttgaaccaatatgtttcttgcccttggggagaggggctaattgccatgttttgatgcggatgcaaagacacttgttctacctgagcctattgacttgatcatggatactctagggtttgaactcaagggaaagaatcaagtcttggcatgtgtggtgacatggcgtggggatggagtaaagaagagtcatagttctgttaggatatgttcttgcttgctacatagaatcgtagttctgttaggattgctatgatattatatctagtagatagattttatagttaattaggataaacatgtgatgatcatgttataataggcatgtgattagaggataggattagcttaattcttatcttgttgttagtttaattcttatcctagttttatgtttatcttagtcgaagttgtagccatataaagggcgttccattcattaataatacttagttttgctttgtgttttaaacatacttcttgattattgtttgcttgtgagctaactaatcaaaccattaaagacttttcaggagttttagtgctaaacatcttaatttcaggagtgattttaagagcgtttagtgatcttgaatcaagaaatatccttgttcttgttcgactaatatcagtggttttgttcgagttcttggagttaatctcttcaagattcttattcaacttgattgttgagcttattggtttagtaatcatatcaagtggtatcagttttccagggaggagaggatagataggattctctttgatcaacaaagatccaagggctatcaacaaggttcaaacattgctgcttgttcaagacttgatctttttctaccaagatgcattctttacgtcacaaggtagtaataacaagattaagagtggtttttacatccaagaatcaatctttcacgtccaagatttcatctttcacgtctaagattcattctttaagatcaagaaagttataacaagcatagaagaacacataaccatggagtccgagatggacaagcttgccaaagctatgcaagcacttgcaaagtcgcaaactgaatcacagagtcgactcaatgagaatactaccacaatcaatgggattggtagtaacatgaataggttggaggcacgcatggatgccattgcaaccatcatacaaaagaagcttgatcggaatagtgccaacttcataggtgccaattcagaggaagagttggcagaacgtgaagaaagatcatccaagactacatacaatgatgatcgtggcttaaagttggatgactataatggagatagcaatcgagaagacttgttacagtggattcgacaacttgagaaggtatgtgattatagaggctttgatgacaagaaaagattcaggattgcctccataagactcacgaaatatgctggaatttggcttgaaagcttcaaggcacaacgagccaagaaaggtaaagaaaagttgtgtagttggacaaagttgaaagttcaagcttaaagagaagttcttgcctagtgactatgaacaaaaatagttcataagactctctactataagccaagacacgcttagtgtacatgagtacaccatggaatttgacaagctagggcttatatttgacatagaggagaaagaacaatggaagattgcaagatacatcaaaggcttgaaccgccacattgccaagaaggtggaagtatccacttatcacacctttgaggatgtgacaaagttggctaagaagtttgaagaacatgagaaggaagagaagcctaagagttcttacacgcctaagtatgatactaatgctaaggccaaggctagcttcctactcaaagtggtatgaaggacctaagaggctaagaacctcaccccacctaaagaagacacaagagttgagaagcctaaagtcgtcgttccaaaggagaaatttgaagagatgagaaagtgcttcaagtgtcaaggaaggagacacatagcaagcaattgtcctaacaaaagagtcctcaccatgagacaatacctagctttgcaagaagaggaggatgtctattagttcgtccctgatgaagagcaaacttaggggaagaagaggaggaggatgcttttgctgaggatgatgcaaggctagtaggggtcaagaggcgcaccttacatgtcgaccatacacctagcatggagcaaatggaaaaatcttttccacactagatgcaaggtaggtgactatatatgtaatggtataatagatagtggttcttgcactaatgttattgtatctgaggtagtgtcaaagctaaacttagctacaagggcacaccctaagccatacaagttgagtttgctagatgatagcactggcatgagagtaaagaaacaagctttgatttcattctctataggggttataaggatgagttatggggtgatgtattgcctatgagtgcatgtcatctcttgcttggaagaccattgcagtttgataaaaaggtcatccatgagggggactctaatgtgtactctgtgttggttggttctaagagggtatgtttgcatcccttagctcctcattcagtggcgccaaagcaaccacctaagacaccaagttactttctatcttcaagggagttcgaacaagaggtggaggaagaaggttgtgcttatgccttgattgtaagacatgctgccacaagtgtcaagactactagcaatgagaagctcgaagccttgatgaaagagtttgaggatgtctttctagaggaactacgacccttgagaggcatagaacatgctgtagaccttgtacctggcgcccctttgcctaacaagcctgcttataagtgtgatccagtggcatctagggaattgcaacgccaaattgaggacctaattgaaaagggctatttaagggagatcatgagtccatgtgttgtgccagctttactagttcctaagaaagatgacacatggaggatgtgcatagatagtagagcagtgaacaacattacagtcaagtaaaggtttcctatgcctagattggaagatatgttggataagttacatggggcatcaatcttttctaagattgatcttcgaagtggctaccaccaaatgaggatcagagaaggtgatgagtggaaaacaacattcaagaccaagcagggattgtatgagtggatggtgatgccatttgccttatgcaatgcgccaagctctttcatgagcttgatgaatgaggtacttcgtccgttccttaacaagtttgtggttgtttacatagatgatatacatatctatagccaaaatgtggaggaacacttgttgaacttgcgtagcttattcatgaagcttagagagcaccaactctatggtaagattgatggcgacgaggttgacgggggattatggcggcagtgaatcaccctctttgccggtcactgaaatacaacctgaggtatctttaaattctgtaattggattgactaacccaaaaactatgaaattgctgggaaaaattgctggatgtgaagttgtggtgatgattgaccctggggcaacccataattttttatcactagctactgttgagaaattagctattcctgtgtcggaatcggaaggatttggggtttctctaggggatggacaggcggtgaggggtagtggaatttgtagaggggtgttattgagtttaaatggtggagttgaagtggaaacagattttcagcctctgggtcttggtaattcggacgtgattttgggtgtacagtggctggagacgttggggacagtggagagcaattggaaaacacaaacaatggggtttgaaatcgagggtgtcaagttcactttgaaggtgacccatcactggcgaggtctcgaatctcactcaaagccatgatacgtaccttatgtaaagagggtggaggtttgtggcttgagttgaaccagattgagcattatcaggagaaaacaccgcattcatcagccttacctgaaattccagttttcttacagagagtccttacccaatttcagtctgtgtttgctacaccagaaggcttaccaccgataagagaacatgaacatgcaatagttcttagagaagggtgtaatccggtaggggtaataccgtaccgttatccacagttccaaaaagatgagatagagcgcctcatcaaagaaatgttggcttccggaatcatcaatccttccacgagccctttctcgagcccggtgatattagtgaagaagaaagatgggtcgtggcggttttgtgtagactatcgggccctcaataaagaaacggtccccgataagtatcccattcccgtgattgatgaattgttggatgagcttcatggggcaacacttttttcaaaactcgacttaagggccgggtatcaccagatccgggttaaggccgaagacactctcaaaacagcttttcgcactcatgaggggcattacgagtttttagtaatgccatttgggttgacaaacgcgccggcaacgtttcaatcccttatgaacgaggtcttcaaaccattcttgcgcaagtttgtcttggtatttttcgacgatatattggtctacagtagttctgccaggaacatgaggagcatttgaccttggtgttgcacaccctagcagctcataaattgtttgtgaatcagaagaaatgtgattttggcaggtcggaagtagcatatatggggcatatcatctctggtcaaggggtggctgtggatatggagaaggttcaagcgatggtggaatggccccttcctaaaaacctccgggaattacggggatttttgggccttacagggtactaccgcaaattcgtacttcactatgctcatatagccaagcctttaactgatcaactcaagagagatgcgtttgggtggtctgaggcagcaactcaagcctttgaaaagctcaagaaggcgatgatcacatcccctgttttggcaatgccggacttccaagagttgtttgtggttgagaccgacgcatccgggtatggtctgggggcagtgttaatgcaaaacaaccgacccattgccttttacagtaagttgttaggtgcccgggctcaattaaagtcgatctacgaaatggagttgatggccatctgcatggcagttcagaattggagatattatctgctgggtcgacatttcctcattcgtacagaccaacagagtttacgtcatctcactcagcagcgagaagtaagtactgccttccaacgttggatgagtaaacttatggggttcgattttgaaatacagtttaagccggggtgtgccaaccgggtagctgatgcattatcccgcaagacagtgggagaggttgaattgggtgcgctgatattaactcatggggtggactggaccgacttggagcgtgaaattgaaggcgatcctctgttgtgcaaaattaaacaagacttccacgggggtgctattactcctgtgcacttttctttggtggacaacaagctgttgttcaagggtcgatacgtgattcccagctcttcggtttttattcctaccttgctgcgagaatatcacgattctcccattggagggcattcgggggacctcaaaacatatctcaggatggctgccgactggtattggaggggcatgcgcaaggatgtggcgcggtatgtgcaacattgtagcgtgtgtcaacaacaaaaaatgtctcaacagatgccagggggggtactacaaccactccccataccttcctcggtttgggatgacttgtcaatggacttcgtggaaggcttgccatcttccaagggggtaaacaccatcctcgtggtggtcgatcgtttgtctaagtacgcccacttcctcccactacgtcatccatttactgctgtgtcggtggcaaatgtgtttgtcaaagaggtggttcgtttgcatgggtttccttcctccattgtttcagatcgggatcgaatttttatgagtgtgttttggcgggaattatttcgtttacatgacaccacactcaaacgaagtaccgcgtatcatcctcaaacggatggtcagtccgaaatcgtcaatcgagctctggagacttatttgcgttgctttgtgggggaatacccgcgctcttgggctcagtggcttgggccgaattttcatataatacttctcctcatctctctaccaaaatgaccccgtcaaggtcctttatggtagagaccctcctactgtgatacgggttaatcggggagcctcacctgttgaaagcttggaaaacatgctccaagagcgagacgcagtattagatgccttgcagattaatctgattaaagctcaacagaaaatgaagagtagtgctgatgctacaagaagagaggtgcattttaaggtgggagatcgagtgtacttaaaattacagccttaccgtcagaaatctttggcttaacgcccttatgagaagttagccgcccgtttctacggaccatttactattttacagaagattgggcaagctgcatacaagttacaacttcctgtttctagcaaggtgcatccggtgtttcatgtctcccaactgaaacaggccgttggttccattcccgtttcagccactattccagagcaattgtcttctgacttggagttagaggtggaacctgatgaactcctcgatgttcgtagtgtttctagaggccagcacacttacttggaagctctcattcagtggcagggattaccatcattcgaagctacctgggaagatgtggctgctttccatcaccattttccatccttccaccttgaggacaaggtgaaactttgggggggtggtaatgtgatgcaccaaactaccactccactactcacctattagaggcgtaagaaaaagggggtaaatcaggaatagtttacaaattctgttgaaaggaatattttgtaattatgatgtcagaggttgttagcaaaaaggcagtagagtaacaataaaaaggggaagggaggagagaagaaggtattgagatttttgtaaggaacttggcccttgggagagttgggagcctctcgaaagctcaccattatcttgtgaatattttccttcctggttatatacaagaaccttcctctgtcaatttcttttctctctaatcttatttcttattctgttttctggttgccattgtttgaagttgcttgttgtgcttgagtaaatacgtgaagtggtgaaacccatctgaattcatcacatctattccaagtggtataatacaagcttgtaatccaaatctaatgagaaatctaagttatgaagaatttcaaaagaactaagtacccttgttttggatgcccaaggatttacttgccgctcaagttaatgctcaacgtgcaagatacaacctctttagtatcccaaggtagtttccataagaattaattgagctcaaatcaagaacaatatttttatgtattaatgtgaacacttcctgaattatattagatatatggtctgaaggttggaagaaagattagcttttaattttaagtttgagatagtttttagaatcgaggaaagattagctcttaacttgtaaactaaggattgctttataagtaaaacattagttatggaactcttaaaattggttttgaacatttctagttaaaaatcccatgtaattctcccaaactagcttaaaatctcacatttcacaagctaaggagagacaaatggcgttctcttgtgaaacaatctaaaattttcattaggctactgttttcaagtatttatatgttagaagtgccgcatataggtacataaaataagtttacaaacacaagtaggaataaggaaaactaaaagagaaacttcagccatacaaaaccggctgaaatcagctactactttctactttctagcttcaaaatctgattgcaagtctcctttaagccaatcaccaatgaaaacctttcctccacatgaagtgtgctcaaatcaagagaagaaacccatcattcgcctatagctacctgggtcagatgaagatacggcaaaaaaaacgctggaaatcagtgaaccaaaataagcaccaattggatgctttctgtccttgctacattttcttctcataggactacttcaagccatacatgaataagcagttagatccagctcctagcatccatttgatcgtacaaatgagctccaaaaagataagtaaaaccaagcagccaaaacctaattaatactaatgatgaattagttgaatagctaatgacgatgaagcaacactttagtaggaatagtgttaattatgatcaatgctacttaatcttctgattaatttttggaaaaatgtcatatctaccttctgtatacacttattcataactatatcgtattattattatttttaaataactaccttttaagtaccaaaacctaagaaatcaggcacttgatggattccatccaaagatccatttggcggggcccactaactgacttttgattttttgcctttcctcttttggttaatctcaatggttcatcaataacaactcaatcttctccccatttcatcaaatcatccctaaatcagaactttttcaaattcacccaaatgaggttatggaaacctctaccaagtttattcgaccacttttagtctagctcaaagttttacacttgcttcaaaaactaagatttattaactttagaaattaggtttttatttttattttttatttaactttgtaacaatcttaaataactcaggtgctttctagagtttggctttaattgtttttcccttggttatgtgaaagaagtatgactactttctccaagactaaagtagagagcaaaaaatgcaattctggaatttcttgcaaaagaaaaggaacgagttaatgataatgaaaaacaaagaaaatgatgagaagagaggagctgaatcaatcatgatcatgtattttaaagttttttttgctattgaagtgacttaagaagaggaaagaggatgagtgaagacaaacaaaagaaaggataaatagagggaaatcttgggcttagaaaggtgaaaaggtaagaagatgagttagtgggccccaacaaatgtatctttggatataatccgtcatgccactgtttggggcttgcttaagtccatacattacttcactaattttacaaaatttattttcttgaccaagaactgaaaaaaccttcagtggtgatctattaggttttggaagttaaaaggtagttatttaaatgtttttaatataaaaggtagttatttagatatttttaatataaaaggtagttatgtgaataaaagtgtatataaaatgtaattttttgacatttttgccttagtttttcttgctaattcaccttttcaacttgaccaagttgctatgaggagaaaacgagcaattattaagcaaatcgcaacactagcattaatccatggcccatgaaactctccataattagagattggattagcacttagtagaacttcttgctcctgctccaggtttccattacttctttatctaagtgcatcaaaaggttgttgggttatgaaaggtggtggttgtgtatagtcattgtcaaaatgttgttaatgcactctatttagaggatgagggattgaatagttttcacctcgtgacctttcattcctttttaaaaaaattgataatgtgtattggtcctatgactgtatgaatggtaataagctatctcatgagctgttactatcttcctcagagtctaggtagaagggtttgggctgataattttctactatgtgcaattagtttgttggatttggatatgctagttgatataggtcctttcccttgggccttctcttaatataggcctacagtgtgattgaagataaatcttctggagaatataagaacaatgagatggattggttagaggttgatttgttcttttggtgtaagactatttcgggttctctattggttatgttcagacgccagaatatgtgttggtgattgttttccatgaacatactttatccgcagagacatttttcttttttcttcctataagattatatttgtttcctctcttggtgctcatctcagtgtctctactttacgttaaactgttgacattacttgacaatgcgtatatttgtcgcatggtgctcttccctcactccacgtcgaccccatacatcaaaaaatgccattaaagaatattcgaactcacaaccttgtgttgaaagaatggaatccctaccaatgactcattaattcattttctctttaagaaataaatgatttcctcacaaacttttaggctttaagagcccaaaagataaaaacataaaataagatagacatcaacgtcaagattagccttaaatgcacaaagcacatgtcaaatgattgataactactcacgagttgcaactctttgggcgttgcctaatattaattggatctcttttaaaaattgttggtggttatggttggtggagaggaccatgtaacttttagctggtcacaactggtaatgattgtcacttttactgcccataaaaaaatttaaactgttgaatatgtttctggcagtggatctgacaaatcctttacaagttggcgtccattttgttttgccatgtgactcaattataatacgtgagttttattatccaccaggtttggctcactaatttccggattaattcaatctaaactgtctccaaagaaggaaaagggtggaggaggaaagccttcttctaatgaaaagacacgcatacgtggttcgttttctttccagggtggaatgcaggtattagcatgtagctttcattctgttaacatttgtggttcttccagacatacatccaatgctttttttttttcttgctataaccataaacattcttgtcatgaacattctttaatactgttgctgagcttagtgtattcgttcattcatgtaatttcctctcttgaggttaaaatggcatacagccttacaacctatatccataatgctccttagagtagaatccctaggttataacatagtaccacttatcaaaataaacatggcacacactgcaggacaagaagtaaatccacctagagaactgagcacctagtagtaaaagcagcgatacattactaataacagtagcagggccataagagtagtaaatgggcctcatttcaacactccccccgtaatggtgagagagaagaagcagtctgaactcccagcttggagagcaaaatagagtgttgctgaacagggagaaccttagtgaaaacatctggcacttgatcttgagatggaacataggtaggctgaataaccccttcttcatttgtattgtccctcaggaaatgacaatctatgtctacatgcttggttttctcatgatgaactagatatgctgctatggcaagagcagcttggttatcacagtagataggagtagcactggactttttaatgcgaagatctttgaggagttgtttgatccacatcacctcacacacagcaagagccatggatctgtactctgcactgaccacaagaaattgcctctttgactttcaagatacggggggagtcaccaaggagcacacaaaaccagatgtagaatttacaacacccatcccattcactatcacaaaatgctgttagttgagcactagacttgttcgccatgagaattcaccctgttggcagcttgaagatgcacattagtggggcagtgcataaatttgcttaaatcatgtatagtgaaggcaatatcaggcattgccttgtaatagtgagataaatgagcttccccatcaatttttgatacacatcaggttgttgaagaggatcaccattgtcagcatagagcttgacatgtgagtccatacgaagcctcaatcgtctgcaatttataaaaccatattcatcaacaagacccatcacatacttctttagagataaaaacgatacttcactacactgatccacttcaatcctcaaaaaatatcttaggccacccatatctttcatgtgaaattggccagcgaagaaactctttgcttcctcaatagttgctaaactattgccagcaagaatgaggtcgtccacatacaccaatatagcactgaaacagtgagagttttgcttgaagaatagagagtagtcacacttggattaagtgaatacattttgctttaaagcagtgttagcttggcaaaccattgcctcaaagcctacttcaagccataaagtgacttaagcagcttgcacaccttagttcatttggtgtcacttctgccatcagtacttagctccccctctccttgaactttgatcctgttacatgtttcactatatcctggtgatagcttcatgtatacactatcctacaattcaccatgcaaaaaagcatttttaacatccatttgtttgcaagaaccaaccctctaaggatgcaacaacaagcatgtggtcatctttgctacaggggtaaaagtctgctcataatctattccatatctctgtctgtcacccatgattacaagccttggcttatgcctattatttgtgccatcagtgctgtattttgttctgatccatccatgtgagggatggctcatttctacaaaatcctagttccgttaggatttgtgttgttttcctaattctagtaggaataggactcctaaaatcctaatcctcctagttctgttaggagtttaaaagttttagtttgattgtaattctagttgtgttagaaatccaaatcctagattcatgtcacgtatggttagaacatggctagtaggataatttgtcttgtgatgtccatagccttggcatttgtggcacctaactttcaatagcttgtcttctgtctccttttctttctccttctttgaggaatcaacgtttttagagctatctaaaccactagcatcaatattaggtttaaaagtgctaaaagatttcgaatagttcttacttgcatacaatttctttttctagtttatgtagcgtcaccagggaacaaaaactcggccgttccgttctggaacggccgctttgtaacggatttcagagaggccgttccgttaaataccgttctagaacggtgatttggaattcacaccaaactcggcgcgatagcgttacgtaacggtgtaacggcgttccagaaccgttacaatcacataacgtccgttatttgaagaagaccagttcttttggtggaggaagaagaagagccaacgcaagatctatagatctgagttaaaatttgaaaataaaacatgtttttttatttaaattaaagcttacagaggatgtagaactcaaattcgagtaaacccctcctttaatttcattaggttactgcaaatcgaaccctaaattgcaaaccctaatttcgaaaaaaccctaatatgcattgggatgcaacgctgcttctccggtcatggcagagaaggtcgacgagtcatcttcggctgcttttagcactgtagctgccggtggttggcttgtttgcaggttagtgcttgctggttttctttctctcataccgatcatcttcttcttttctctcttctctttttcttttttattgtgtgactgccagtcacgtgataattgcaactcataaagtatctctttctctctcttcttttcatccctttttatttttctttcccttttagtttttattccctcacgtggaatcacctaattttcatccttttttatttttttagttacactcttacacagaagtatgttcaaatatcattatagtacctcaaatattgtatttataagagttttggacataatatgatatagaaagtaaaatagaagaaaaataaagtttaaatgtcacttgtgtgatttttttaaaaaaattcacgccgcgacggccgcgaaacgttctatttcccgttacaagccgttcccgcgataacgcgaccgttcccgcgaacgcgaccgcgaccgcgttttttttccttgagcgtcacatcttgcaagcttcttcaaaggtgagttatgtgtacaactccaatttctctccaatcccctccgtcctcatttaggcctccaaggaagctacttaaacattgatcttcaagttcatcaattttccaaagaatggataacttctcgaactcctttatgtaatcttcaacggacatattcccttgtttaagagtagaccattccatgtacaagctttgtttgtagttagaaggaacaaaacgtcctcttaacaactttttaagcttatcccaagtagagattttgggtttattagctttcacacgctgcctctttactccatccaaccaaatagatgcatatttggttaccttaagcacggccaccttgtatttcttttcttttggtgtctcttaatcccaagtagagcttttgcgtgtgaaagctaataaacacaaaatctctacttgggataatcttcttcttgtttccgaaacaactaattcttatggtagttaggaaagcaagaatggtttctaattcaatagggaatatattaattattattagtttaagttaaatagtgcacgaatctaaatagattattcgtctcaaaatctcacttaagtatagatttgtttggacatctgagggaagaagaagagagcgagataaaggagaattatcactcaatgaatccatatcccgagttttcccatttacttctttgaaagcaatatagttcacgaggtcttattatcagtctatggacataagagtaataatttaagggcaaaaactatgactttatgggtttaaactgatacatgttctgttaaactgatagatgttctgtgttaaaccgatactcatatattcctggttaaactgatagatatatgatttaaattgatacccgtctcagtcatgtcttggattgagacggtctgacacaagactttttgtgtattatatatctgattagaataaatttatcctgtttactaattattttatcttctccagacacttgttgacacaatatgcaatcagtttggtaaagatgaactcaaactacagtgcaaggtcctttcattgtcctacagtcataaggggatcccttcttcagaaaattgggtcgtgtcttctgtgtcaaaaaattccattgaagatcaacaatatgatgctgtcatcgttaccgtgagttttactttgcttactgctattgcaccaatctttcttcttttgacacactgataatggcaatgctgttgtggtttgaagccatgttatggggttttagggatatttatggagtctgatctaatatgttattggataaaattcagatctgtaacgtgactcaatgagattgaaaaaaattgaatcaagataatggattggaaaattaggagctaacctagggtctataagcgatccacttggagtctcataccaagcaggtattcgacattttaggtttatattgctgctatggctcatatgggagcctacatagggtctggtgcttattcctttttcttttgtctagttttggggctgcacatttctgttgtgttttgatatggatagccatcacctgcaattgcatggaggctgaactaagttctataggggagcaaacagtatctgttggaaatttattttcatattgtgtttttaaatgctataatccaaaatttgttgttcccctaaaatgcctaaaatacccttatgtaactgctccatctgtcccttaatagacttcccatttctccaatgcatgtttgccaatacacattttgtattgttaatatcaaaaattacatattagtaaaaattataaaagtttgattttcctaatgtacgcaatgagacgaatcaaacaagacgccatatgactatgttttttcttatacttcctatgttttttaataagtgacatgttttccttttagggaaatgtcacaataagtgacacatagctcaaagtagtaaaaatacttctcatttattacatctttgccattatttaattgtttcacctacctactttatccaatactcaaatttgattggttgaacaattggtcccaactttctctagactccttggtattccctttcccccactttctctctgtgtcacttattaaaaaatggaggacgtatattggaaaaaaattggaaggttttcttcacttatgaatagtggtaaaattagagatgggaaggctattttgggatggatggagtaatatttaaatttttaaaataatgtcattgttttagtgatgaaataaaattcaaggctattttttctagtaattatgttatctgtacatcaccacacgtatcgcgtgcatataagactagtttgatgatattccaacactgttcgaaggaagtcaggcatggaaccatgtttgcttccatatgggaaatattttgcttactctccttcaaacatctacctcattatcccagaatgattgatcgaatctaatacaaatatacaattgatcatatgccaccagggaattacatcaaattaaatttttatagaaggggaatcagtcatagcctcatagggaacgaataagtgatactcgccagtttctttcctggttacttttcctcttctcactagccatcctttatgtatgggtatgctgcatcattcctgccactggttgggactcccgtttgaactatggggggatgggaaagctaagccatcatcttcaaattgagtttcttgagaatgtaagacaccatctgtaagatgaatatagtgcactctatagtcaatgtcatgatctttatgggtttatctgctgaaataactgtgatatacccagctctccatttacaaagttttcctacatattaaactcttgcccgcaattctagaacttcattgtagaacttttcctacataagcatcatttgtcttttctgtagtaaaagttagaaagagctttattttagaacattcgtttttagttttctttgttgttgattactccgccacttttaatacttttatgattcaagtatttgacaaaatcatgtaatttaggtcctctgctgcatgcagtctataccctctctctctctctctctctctctctctctgtggttgtgtcttacttgttgagttactaactccagccattacataaagtaggctggcattatgatgagcaaattactcaagaccacatgttagctcctttttcttttctccttattctgaaaggcaaatataggtccatcttggtgcttctcatgtcataagtaagctgaccccctccttttccagggaataggacaataatccaaaagtgagggttttacatgttgggatttgtgaagtttcttattttacttaatagccgagtcagtgttacaatacatagtaccgtgttacaaaatagtatgtaacaccaagcatgtttatgtgcaaaattgtgcaagactttgttgctggcacgccaagggctgttttaatgtagtttacttattcttttaggtttttcagatgacaatcataaagggaattaggagtgtttttattgtagtcaatccctattgtgctacaacgataaaagaaaaaagcacaagactagaaggagaagtaatgtctaggaaagactcctcacctggggttgctagtcacctacacatcttagaaggcatcaaaccaaagcttattcccctcgactgttttcgggagaaaagaagacaaaattgtttctaacttatactttaccagtttcactacagcatcagaaagaagcaaaatatgctcccacaacacggcgaacctagctttccagatgtgataaaccagaccagcaaaatgattattttcactagagctttgagtctattttttcggtttttccccttcttcctggtaatgtcacgccaccaagccatcatctcaattttttgagatttgacgtaatcgctcaaatagctgagtaagacacttcttgctctaaatactaataaaaaagaggtgaatgtgggtctcagccatgttactcaaatcggataaagtgtctactcttattagggtttttgggtgttggactcatccatttttttttgtaaaatgtcaagattttggtttgaaatgagagattcaagtgtcgtgacatgagtcggcacgcaacacttaaacgtgtcgaagtaacagagggtctcagacaatcaactttaatcaatcacgaaccccaaaatttatgcaacctttgctcatattcagtctctgtaaagcactcaactgcagcacacccacccattcgcttcacctacagcaggagggcacccaagtaattgctatgatgagcgaattattctgttttgccttgctggaatattgctgttagatttgctgactcactggcagttaattatagtcagagaatgagaaatatcctgtagagagagaaagggtatcttttgtatttagctctataaatagctaaggaagggaagggcattgagagtttatgatattataataggagagatttagcctctcgaatgctgataggagcgtagctcttgttggattatcaatactactctgtttgctctatctatttctactcaggttccttcttgtacagtggatccctgattggatttacttcatcaaccagcagataaaattatttgtaggcacattgaaaccattccaaacctaatgaggccaaagtttatcacaaagaatataggagccaaatgtaggcaacagataagagtataattgccagaagttgaagactccaggtattgttcagaaaccttaatgcatatcatcattctgacactagattttccccggagccaactaacaaaaatgaattaaagagattaaggctatgtttagttcacctgaaattttctgatctgaacttatctgatctgatctgaacttattttttctgatctgatctgatctgatctgaaccaatctgattacaagatcttatcttttagatttttctcaatatataagaaaaaatatagtcatgtggggtcttgtttgattcgtctcaatgagtactttattaatattcaattattataatttttactaatatgtaatgaaagatataatgatttttaaatataagcatgatctgaactgatctgatgtgaacttattttttctgatctgatctgatctgattagatctgaaataagcaaaaataaggtgaactgaacatagcctaagcaacaattgagggaaaataagatcattatggctaagataagataaatatgtaatgataaaatcagagtaattatatcagttacactctcaacattcgtcagattgaggtttcctcccaaaatgccaacccacttttctgtattttcacgtccttctctctacccttctaggtatatattacatcagctgtaaaatttttgaaccaactagtagaatactgatctaccctcaactgcctcactttctcattttttctgggcctttttctctctagcacaagtccacataagtgatgcatagcagaaatataattccactagtcatcctcaatattgatataacaaacacatcacccacatattatcatttttaatcgctgcatgcgaggcatacttacccaccaatcaggatatgcataacagcgttcctaattccaaaaccaccatatatcttgggtttgcaactctcatccctagcaacaaggggactttctgaaaaagtggcagattccgcccacaagtagtttgtacggacacctttattatattattaatatcatatttcggcaacacaaattaccagcccagtaaaacatgaattgacatgagactaacaaggggcccaatctaatatcgtacgtctgtactaagcaatgtataaaaaaaagctcaaggtgcattgatgcaatagggatcctaatgtgcataggtgcgcctcattgaagtgaggcaccactaaggataaataaaaaagattgatgtaaaattaaattgtgcaccttgggtgcgcctcgatgaactttttttgtgtgcctaagtgtacctcaagtacgcctcattgatatcgcctcgcctggcagaaaacgagcttgaccccaatcgccttgctccccaccgcctaggcgtgcctcagtcacactttttaaatacattggtattaagtactcagaatggcaaaaagaaactttgggcattaattagacatttcactttttgtgcaactatttgtgacttcagagattgatatgttttctacattacagacttttgtgatggctgcatggtctccactgtcaaagaacattagtttaagtagaagaaatattgctctattaccttcctccctctacaaacaaaatcctaaaatgtggttatgtagtgccaattcaaacttgtagatgcatgactaatgctttcattatgctgtgggtttttatactatgattcatgtccaattacataacaattagctggagtcaggatatgtcacggaaattttaagcctggcaggatgattgtttatattttctctttttcggtgtttaagtcaaagtaaacttctaggctgctcttttataggctagttgggctgttggggagatctacacattaagtgtgaagaaatcttgtctaactccagtttggttgagaactgtaagctgtcataacatttgttgcatgatgaggccttgtgggattatcatgttagctgtaaactctaaacttacttgaaatctagtgttgtgtctccttatttctgtagtcaaaattgaaccttctgtacgtttttgatacctgcgactagaatgatggaattctgaattactgatactattacaaccatctgctaagaacgaagatgactcttagctaatttctcagcagatttagagaaattaagaagaattactaatgaatatttaaagagaaaactaccaagatatgattgtattgatgaaaaacaccaattacaacctaaccaacattcgagaggttggagctctcccaagtaaccatttctctcactaaacttatcaattttcaagatgccttttccattctcagttcctctatatttatactactccccttagcaaactacccaacttattccccaagtaaactaaagagataatatctaaaatacccttccccctacaataatattagttcttagcattaccggccccctaaacttccaccttgtcctcaaggtgggtcgtaatcatcactaaattctgggcctctactcgtatattcagtgtcttgcagcccttcaggccccaagcctaggttatgcagctcgtgttgcggctcctcctcatatagttctctggctggagtgagtgcctcaactataatgaaaaagtcctggaggtggggaaggaaggagtgtctgaaatggtgtggtgtgctgctggtgttatgggcttgtgcctgaaagttttgggtttaaagagatggagtggagaagagtggagaagtgactggagacgtaaaagaaggaatcataatttttgtaagtggtgggttgaaaaagttggtgggaagaattgtttttataaaatgtagtgtaatggtcgaaaaatgggtggagtaagtatggtttttggctggggatgtggtactgggttgaaaataaataggtctgagcttacttgtaaaattggcctcaacatgagcaggcccaatatcttgagccaattccccaaaagctggcaatagagcactcttaattgcattgttgtgggccatcgggctccaaacatatattcggaggagccggacttctttggtgatgtcattagcttggcccattgcacactttcccttaacagcctcaagatcttttcccacttttgtaccccaaccacgtggcttcaccatcctttctttcttgcttttgtcacttttttggcaatatacgagtttgtccttactaccctcatcttctaatgttggcttcctcaccaagcttaatttctggaattttgtccaccaaatcccaccacccatcgtcaacaccatacctatctacaccggccaagaagcctggtcctccacccgaattttcgccacagacaaagcctgaacaaccgtcagttctctcaccggagaagttcacaggtccaccacctgacccactagttgctgatccacccttcacaaatctccctcctctggctgccacaagtagtggttcctccgtaatactcatatttctcgtccaagagccctggaccaccaccggacccacttccaccggcaccaacttgttcaaatgatacttctctttcttttccaaacagcctacttggactggaaaaaccactgcgattgtagcctccgccagatctgtagcctagtgcacctaacgtgcttccaactgcaacccaatagggatggaaatggatgggattcggggagggtggagcatcacccgcatccgtcacccgcatccattcgctccacccgctccacccgcatccatccatccgtcacccacgggtgaaacgggtgggtcggtgataaacgggtggaaccatttagggggtgtttggtatcatgtttttttacaaaagaaacagaatcaagtaacaaaatccgtttctacttgtttggttctatgttgctcagactcgagtacccatgtccgacacgggtacgtgtccaagtgtccaactcagctattttctagaattttttatattttttaacccaaaacaaagtgtccaagtgtcccacccatgtccgactcccgaggatccgacacgggtacttgaggtgaaatgaagagtccgagcaacggaggtttggttagtgtgtaaagtaacaattaccgttacttgaggaaaacacatccccccaagttgtttccattcaaaaacctaaggaaacaaataacgtttcactcctcaaacaagaggaaagggaatgggttatatttatttccattccattaggataccaaacaactaataagggtaacacttattattatcctttcccctccttatcaaaatcctttccattccgtttacggtattcataccaaacacccccttagtatattttctaatgaaatttgtgatatgatatgcatgatataaaataattctatcaaaaatataaaaagtaagtaaacttacatgtacaacttaatagatgggtgatgggttggaggttaaacgagtgatggatcgggtgacgggtgaagaaattctcacccaccactcgctttccatccatttaaattaggtttttcatccatttaaaaaaccgggttaaacaggtgatgtatgatccatcacccatttccatcctcaaacacatcccgatttgtttactgcaccaccagatccaccagtataaccacccgaaaaatcatcatgccttctactagccttgtaacctgctcccggtgagaagcttcttccacaagtggtggtcgctggacctccatctccttcttccccaaaaaattttccatgacacccactcgacccttcatctgtgacaacctcttcttcgtccacctctgaagttttggggtcgtcttcctcctcaagctcctcttgaagtaactttaacttccgttggatgggagagaacgcttcattgattatcttcaccagatcttcttgaagtttctcgaaactttttctcacgttttcctctacctctttcgtgatttcctttccgatctccttcatttttagactaggagctcttgcgattccatggcagatttctttttttaaaacaagaaaatcaggcacttaatctcccagaatagtggtgctctgataccattttctaagaaccaagatgactcttagctaatttctcagcataacaacaaatttagagaaattaagaagaattactaatgaatatttaaagagaaaactactaagatatgattgtattgatgaaaaacaccgattacaacctaaccaagaggttggagctctcccaagtaaccatttctctcactaaacttatcaattttcaagatgccgtttactactccccttagcaaactacccaacttattccccaataaactaaagagataatatctaaaatacccttccccctacaatattagttcttagcaccatcaaactgggatggatggttttgtaaggttccaatttacttctccatcaaaatattttaggattttttatctcatgtattttagagtttcctcgtccctttttatctgataagattcttctgatgatttgattttatggtaggctccaatcagcaatattaaagaactgaagattctgaaagctggagttccattttcacttgacttcattccagaggtttgtatttttatagtggttagacatgcttcccctagttttcaaagtaaaagcatccttgttgtgacgatattttttcccttgtttttgtttttattattatcatcacttatttccattttctattttccatgctgataagatgttcatcaccataatcttgtggtatcagaagtgtttagtggagtttattcactacacatgcagttgttcttttgccatgaccgccattcattttctcgtcaaaacaaatctatgaagtttggttttcagactcatggttcttgtagctcttgtgaatttttttttcttctccttgcatgcattcttcaaattacatattgcatataccaggtgctctcctttattttatatttaatttttaaaattctatcatatattttttaatgtcaaacctcaaactaggggttcactgcatcttaggcttaccaggctaatatttctttacttaaccttttccctttatatttgctatcctcttgtgtagtaatcaccataagaagggtacaaactaaattaccctcccattcttttgtatcattctgaaatagtgtcacagagctttgatttttttgccctcatttaatctggcaaatgttctctctatttttttttttttactttcttttgacgggattctcaggcaattgttacggggagcagccagtcacactgtttctgtttattatgcaggtgagttacctgcccctctctgttatgattactgcgtttaagaagaccagcgttacaagacctcttgagggcttcggagttcttatcccttcgaatgagcaacataatggactgaagactgarggtaattgtctggttcacgtgtgtagcgaatcagattttcaaaccctgatttcgtaacattgcaggtactctgttttcatctatgatgtttccagatcgtgctttctccgatatgtatctctatactacctttgttggaggaagcagaaatagagaacttgcaaaagcttcaacgtatgagatatgcaatgttttaaatgtatgctatagtcatcgtttcaaccttttggtgcctttttcttactaatttatcctcctggtttaatgatcttagggatgaattggagcaaatagtttcgtctgatctccaccagctgttgggcactgagggaaaacctacttttgtgaagtattgatatctttcacccaacttaacatgatttgtgcttataatatgttaaataaagtaactgaaatcctgaaattaagactacgaaactgtatggtgacagtcatttttactggaacaatgcattccctttatatgggcacaattacgactcagttctgagagcaatagaaaagatggaaagagatcttcctggacttttttacgcaggtaatctgtcatttgcttgttgcgataaagttcatgtacagttggcatatcaatcaacttgcattctttcttgctaactccaaacaatcaggatcattaacttgtaggctgcagcaacagagagtatctcccaagttgttaggtttcatgtaacctcgtcgctgagatgaaatttccgttggctaaaaagtgaaagttttgtattgatgttacccaaaacaaaagtattttgcatgttgcttgaagttttggttgtttcagatagtacatcctttgacatgaaaataaatggaaaagcgtatgtcaagcaattatcatctagtttctttgtttctagatactagccgcatttgatcccagatcatttttgaggaagtcagctgaaataccgtagctatccttcagttttcataataaaactttaatggatctgatgtacagtaatttagtgtgcaccgggttaataattgatattaacttcatatagtgagtcttataaagatataatgaacttatatacaatatagtggattttattaatggaaaacatatagtgaaactatatgcaatatagtatgatacataaagacttagacaacaagagcattcgaaattacaaagaacaaaggaaagaacaattgtatcaaaccggttcgaatgaacaaacaaccaccacttccacaatcaatgtaccaccaatcaagactaaactataacaatgagcttctagtttaagtctactttgagttttaatcaccaattcaacgattagatgatcaaaattgcaaaggttaagagttggtcaaacctaaccaagagttacactaggcacatagctttgttaggagtatattagtttatgaattctagttaagttagaaatccaatacctagttggattaggattcctaattggattagaattatagtttagttagaattctagtaatagtaggcgtgtgattaggagatataattagcttaattcttatattgttagtttaattcttatcctcgttttaggtttatctttagtcgaacttgtaccctatataaggggcctttatttcattaataatatagtttattttgagtttaaacctttacttgtgattgtttgcttgagaggttattaatcgaaccattaataacttttcaggattgttaagtttttagtgttaaacatcttaatttcaggagtgattttaagagtgtttagattcttgtattcaagtttcaggactgatcttgaatcaagaaatatccctagtttcgactaatatcataagtagttcgaattcttggagtcttttcttcaagattcatattcataacttgattatttagacttcttggttttgtaatcatatcaagtggtatcagttttccagggaggagaggatacaaagggttctctttgatcaaagaagatccaagggcatcaataagaatgacacttgcaataagttcgagtgatacaaacaacttcaagactcgatcttttgctaccaagaaccaatcttgacgcctgaagattgttaggacaaaggataagaagtgtttctacatccaagattgcattctttacgtccaagattgcgtcaagatccattctttaagttcaagaaaggagtagaaagcattcgaacactacttaaacatgacatccgagatggataagctggctatggccatgagtgccttggcacaatcacaaactgagtcacgcaaccacatgggtaggatggaggcacgtgaccgtggattgaaactagatgactatagtggagatggcaatccagaagacttgttggagtggatttgccaactaggcaaagtgagtgattataggggctttgatcacaagaagagattcaaggttgcttccattaggctcacgaagtatgctggaatacggctcgaaggattgcatgcacaaacttcttgcctaatgactatgaacaaaaacagttcataaggctcgcatcaataagccaaaacacacttagtgtacacgaatacagcatggagtttgacaaattagggcttatatgtgacatagaagagaaagagcaatacaagattgcaatgtacattaaagggttgaatcgatatatagccaagaagatcgaagtctcaacttatcacttctttgaggatgtgactaaattggctaagaaattcgaagagcatgacaaagaagaagggcctaagagttcttacacacctaagtatgactctagtgctaaagggaaatcaacagttccctactcaaggtggtcggaaagacctaagaaccccactacacctaaggaggacactagcatggagaagacaaaagtggccgtacctaaggagagtttaattttgtgttttatacatctttgcttaagagcttaacaattgaaactattaataacttttcaggatggttaagtttttagtgttaaacatcttaatttcaggagtgattttaagagtatttagattcttgtattcaagtttcaggagtgatcttgaatcaagaaatatccccttgttcaactattataattgatcttattcgagttcttggagttaatttcttcaagattcatattcatacttgattattagacttcttggtttagtaatcatatcaatatcattagcattaatttacccccagggagattaagaaaggattagcctaatcaaggcgcttaagaagtttttaggaaaaatcgtgcttgttaagcttaagaattgaacttctttcaccatttgcccttgattctcttgttgaactagaagatcttggttcatagtagatgctcctgcatcatagtagagcatttaattttaattttttaacatgcacgaagatgtaggtagtgtagtatatatcgtgagacgtggtttaacatatagaaagatgtagtttctgcatgatatagtgagtttttgcatgatatagtgaatgtctgaatgatacagtggatcgttccgaattgttgtagtttgtatgatatagtatttttgtgaatgatatagtgagtttcttcatgatacaatgggtttctgaatgatatagtggattgcttagaaatgatatagtgagcttttgtatcatgtagtaggtttctatgtgatataggttgttaaaagatgatacatgcttttggcctcatgtactctaatgttaacgtgaacccggtccttgcaagtcaattgcagttttttcaatattaagctatttttttttttttttttttttttttttttttttttttgtacgggaatatttagcatctttaccacaaacataaccatacgaatattatgcggaaattccagtctgaagtcttaacttttcaaaattaaaagcttctatattatttttggaatgaaaaaaaatgagctatggcatgttattttgaaatacaatgagtctcaaggtgcatagtggcttcaattctacgaataatgaatggactactgatttctaattttttgttccgggcttttgcattaggtaaccataaagatggactctctgtgggaagaactatttcctctggatacaaagctgcggagcttgtgatatcctatctcaactctacttaagatgcctaaatgatcgaggagactccgtaagtcctttctctgattctatctttgaactgagtggaaacacgactgtggtctaaagtagttgatgtctcagatatccagaaatggcgttagtgatattcaggagctgtccattgaccctttgattcattgttgcagtttactgaaagttgttagctggtctcagaaaaacgaaaggaaaaaagggggaaaacaaaaacaaagaaacgtagattgtggtgttaaaatcaagaattccagagatttgtaccttctttatcagttgaattgtttacagtgtgaatcaagaagttagctcgaccttcttttcttgtgaatggtaagatttcgtgatcatcaatacttgattgtgctgtttgcaacttcaacggtaagatttcctgatcttacagtttaattgcttgtgctgtttgccactt

SEQ ID NO: 36 - DNA, 1575 bp, synthetic construct
  misc_feature 1..1575: note = L397E mutated Beta vulgaris PPO2
  source 1..1575: mol_type = other DNA
atggtaatgctatacgattctcacctctcaggagtctcaactcatcttcaactatcgcaggcatttcccaggaagaacccattaatggccaaagtgtctgagccgggtaaacccacttctgctaaaaggattgctgttgttggtgctggtgttagtggacttgctgccgcatataagctaaagtcccatggcttgagtgtgacattgtttgaagctgatactagagctggaggaaaactcaaaactgttgcaaaggatggtttgatttgggatgagggggcaaatactatgatagagagtgaagcggaggtcacgagtttactcgatgatcttgggcttcgtgagaagcagcagtttccaattgcacaaaacaaaagatacattgcgagagacggtcgtcctgtgctgataccttcgagtcccattgcacttctcaagagcaatatcctttcagcgcaatctaagctacaacttatgttggagccattcctttggagaaaacgctatgcttctaagatttctgatgagcatgctcaggaaagtgtgggtgagttttttgagcgacattttgggaaagagtttgttgattatctaattgatccttttgtcgcgggtacaagtggaggagatcctcagtctctttctatgcgtcatgcatttccagaagtatggaatattgagaacaagtttggctcactaatttccggattaattcaatctaaactgtctccaaagaaggaaaagggtggaggaggaaagccttcttctaatgaaaagacacgcatacgtggttcgttttctttccagggtggaatgcagacacttgttgacacaatatgcaatcagtttggtaaagatgaactcaaactacagtgcaaggtcctttcattgtcctacagtcataaggggatcccttcttcagaaaattgggtcgtgtcttctgtgtcaaaaaattccattgaagatcaacaatatgatgctgtcatcgttaccgctccaatcagcaatattaaagaactgaagattctgaaagctggagttccattttcacttgacttcattccagaggtgagttacctgcccctctctgttatgattactgcgtttaagaagaccagcgttacaagacctcttgagggcttcggagttcttatcccttcgaatgagcaacataatggactgaagactgarggtactctgttttcatctatgatgtttccagatcgtgctttctccgatatgtatctctatactacctttgttggaggaagcagaaatagagaacttgcaaaagcttcaacggatgaattggagcaaatagtttcgtctgatctccaccagctgttgggcactgagggaaaacctacttttgtgaatcatttttactggaacaatgcattccctttatatgggcacaattacgactcagttctgagagcaatagaaaagatggaaagagatcttcctggacttttttacgcaggtaaccataaagatggactctctgtgggaagaactatttcctctggatacaaagctgcggagcttgtgatatcctatctcaactctacttaa

SEQ ID NO: 37 - protein, 524 aa, synthetic construct
  REGION 1..524: note = L397E mutant protein of Beta vulgaris PPO2
MVMLYDSHLSGVSTHLQLSQAFPRKNPLMAKVSEPGKPTSAKRIAVVGAGVSGLAAAYKLKSHGLSVTLFEADTRAGGKLKTVAKDGLIWDEGANTMIESEAEVTSLLDDLGLREKQQFPIAQNKRYIARDGRPVLIPSSPIALLKSNILSAQSKLQLMLEPFLWRKRYASKISDEHAQESVGEFFERHFGKEFVDYLIDPFVAGTSGGDPQSLSMRHAFPEVWNIENKFGSLISGLIQSKLSPKKEKGGGGKPSSNEKTRIRGSFSFQGGMQTLVDTICNQFGKDELKLQCKVLSLSYSHKGIPSSENWVVSSVSKNSIEDQQYDAVIVTAPISNIKELKILKAGVPFSLDFIPEVSYLPLSVMITAFKKTSVTRPLEGFGVLIPSNEQHNGLKTEGTLFSSMMFPDRAFSDMYLYTTFVGGSRNRELAKASTDELEQIVSSDLHQLLGTEGKPTFVNHFYWNNAFPLYGHNYDSVLRAIEKMERDLPGLFYAGNHKDGLSVGRTISSGYKAAELVISYLNST

SEQ ID NO: 38 - DNA, 37009 bp, synthetic construct
  misc_feature 1..37009: note = G398A mutated Beta vulgaris PPO2
  variation 32465: note = n is any nucleotide
  source 1..37009: mol_type = other DNA
tattccatcgaatgtagcaaattgactgtccgttgcaatttcggagtttccactcgtcgcatggtaaatggtaatgctatacgattctcacctctcaggagtctcaactcatcttcaactatcgcaggcatttcccaggaagaacccattaatggccaaagtgtctgagccgggtaaacccagtaagtcaaacattcgaatcacaactcaagcaaatttgtcttgtttgcgttatattttgctcatttcagccttttttgtttttccgacctttgcatactgaatattgtgtgtgtgtgtgtgtggggtttcagcttctgctaaaaggattgctgttgttggtgctggtgttaggtaaattttcgtctcttgcagagtttttgagtcatttgggaattctatgtgaaacttgtaactcccttcagtccaacgaacgcagtacaattttctatcaaatcatggtcctaatttccaattttccatatatattgttggaattatattgggattgtctatcactattaatagtattaggatcaattgtagagaagcacagaaatttttgggatcgaaagaatatctggattgccacattaacagcagatataattcttccaattggtttttggttcttcctaccttgacttgtctggtcaaacattataaactttaacctttaatatccattaaagtaaactataggatttttttgtctaaaacatgcttatataacatgaaatttgtgagaaaccaccttatatatatttttttgcgaaaacaaaccttaaacaaaattattatcgtgagaacaaaccttatgccaatttcgatcattgacccaaggttttggcattgaccgtgtcatgaattttgttgggtttaaaaagtcatgtgtcttgcatacgaaatggtaaatgcgggaaccttgggtcaatgtttggaatccgcataaggtttgttctcccaaaaaatgtttttgttcaaggtttgtttttgcaaaaaaacttatataaggtgctttctcagaaatttcatgttttataaagtagtatttgacaaaaaaccctaaaatatattatagaattattattgactaaattgtgtaaaaatgtactcttctaaaagtacattatagtattttagtggaacatttgcgagaaactactttataaatacgatttttgcgagaaatttcctaataaaaaaatgtgaagtgcaaaactatcttattgataattttctactccctcaaatccaaaatactatgaagtctttcctttctggtttgtcccagattagtttgtacgcttccatctttggtatgatcccacttttattatacttattagttttacgtgagttccttactctatctcttttaacaaaaatactcaactatctctatccaataaaaagttccttactagtcctatcacatctgctttttaataaaataacgtttgataaccacacaacttatatccttaaaatacacgttcaaccaagtgttgagattaatttggacggagggaataaatattttttgaggcatattggtagcagtattcggattccgataggttgactatgtttccaatgttgaccaacacttgccttgcatgtaattctaactttgctcttttttattcttcatttccctcgtattccatatacaatgtttagagacccattccttcctcttctcttctttcccttccttactatgctttgccataatcttcctcaaatgagtgcaaattaatttgtcgttgatgtaggccaactgattgtagcacatcttcatagttcatacctcaacacactcgtaattatattataccctacatgttaaatggctcatgaagctttattttatatcatacttcctccgtttcacaataagtgtaacacttttcttatttggaataatcacaataagtgaaaccaagctccaaatggtaagaaaagttcactcttattacaaatataccaccaaaaagtaagaggggatcacaacttcaatacttcttcactctactttattgtggtcccaactttctctctctaaattccttggtaactccccactttctctatgtttcacttatggtgaaatggaggaagtattttgtagtggtatttagctactaggccttggatgatatacaatcatacaatgtatttatattcacgataatttgctgcccaccttgattaccatgatttccaccaattttatcaatttcagtacttcaccaccccgaatttatattttttatttccaaccttggtatctccatttgtctgagtgcccgatccatttgtatcgcctccagaattgaagaagcttcctgcagctagacaattaggaaggttaaaaaagtttggagatggtggaggatagccataataatcattgttgggaggtggaacttggaaggttattgtagggttgaagtccttgatgaagaagaattgagttcaaatgagaggaaaaaggagcagggaagagggacaataagaaaaaaaagggtaaactaaaatcacgtgtaaggcatgtgcagatcaacatcagaaagcatagtcaacctactggtattagggcactgatacctttttgggtcaaaatttttttacaaggtatttcatgaggtagttttgtccatttttttttttacaaggtatcgtctcattttttttttatcatttagtttctcgcaataagtgtatttcatgaggtagttttttccaaaatttcctcatttattataaaatacctcatcttttccataaataatgcaatgtctagacttttacgctgtttacacatgctcctttgaccatctattgacacacaaggaaaaatagagtagagtcatgcaggatcttgttagatttttctcgatatatactttcaaaagatcaatttttttataattttttttttgaggggattttttttttataattatgtacttatcaaaggtcaaagttgtgcaccgggaagcataaaactctatgtgttgcaatttacatggaaggggaggagtataataagagaaaattatggtaaaaggttcattcctggagatcatgagaaaggaagtagaaagaacaaaaaagaacaatgggagtgcttttcaatgtttgttgtacgtagcatttattcatttgctataatgttttgtgacattgtagtggacttgctgccgcatataagctaaagtcccatggcttgagtgtgacattgtttgaagctgatactagagctggaggaaaactcaaaactgttgcaaaggatggtttgatttgggatgagggggcaaatactatggtaatgtttttgattattgcaggtcttgcactttagcgcacaattaatttctggatttttttttgtactgtggtggttatggtcatcaacatgtctcacccactgtgcttgcagatagagagtgaagcggaggtcacgagtttactcgatgatcttgggcttcgtgagaagcagcagtttgtaagtctttcattatctgaatggcacatactttatttcgaaagattgtaattgccttttctttctagatggcttcatcttcatgttgctttctgattcagtttcgtggctaactttccaagtttgtctgattgctaactctgtcatagccaattgcacaaaacaaaagatacattgcgagagacggtcgtcctgtgctggtaagtttgcttgttttacttttgacctcttttaagatctttcaactctggagcctggaaacatggtgatgcaggaggcaagttctctctattttacatcctttcttctctgtatcttatgacatttgcctcttattctgtgcagataccttcgagtcccattgcacttctcaagagcaatatcctttcagcgcaatctaaggtcgttttatgttaagacatacttgatgctgagagtttattgaattcttaaccttcttcttattttttttttatttttttagcaaaaggtaagtatattgcatttaccaaaaaacagtatgtacaccaccacagcagccatgtcagaatctagaaataccaccgaaaaaatcctacacccaaccagagacagttatattatatcctactcctaagtttctgtacccaatttacatcaatattggtccatttacaagatatttttataattcacagaagcacatcagttttaattagtttaataatgacctctggatgaataaccaactcagaccatatagccttattcctggctttccggaagttgtacgccagagcagcaagcacagcaatgcaaacctgtttcttatacctccttttatgtgtcttagcccatctcttatagctagtgaagatacagtcgtgtgcacaggattgaaccccaatccaactagcgaaagcctcacaacattatgactataaatacatctgaagtataaatgctgcacctttttctcctcttgcctgcacggtatcagaacaaatcccagctttagctaacaattccctggttttcagtttattcaatgccatcatgcaagcaatgaaagaatgttttggaacattcagtttgttccaaacacagtgagagcaagggacctttcctgcagttccacttagccacttatatccctgactaatagtatgactctttgcaccgtaaattgatttcaacttaactttttcataagcagtgaattgtgtgttgttagagtgtctagctgtctaggagattgggagaaaaggagggaccaaggagatagaaacacacctttgtgtttctttgtgtatttactttttagggtgggtcacgttttctgagaaatttgggaaaaggaagaaatagtaacacactttcccatttgtataacctgtatactggagctccaatataatttgcatttttttttgagctgcaagaatatgttgacaaacagttattgcttcttcctcagctacaacttatgttggagccattcctttggagaaaacgctatgcttctaagatttctgatgagcatgctcaggaaaggtaatgtcaagacatgtgttacctcgccttaattttcgttccaggaggtgagcatgcatttagaactaaaaggcacaaagactgttggtggtcttgcctgttcaaatataatggagaggagttttcgctacatttaccctctcttgaagtggggttgaaatatagcatcaagttgaatgcttgattaagtttaaaggacttgtgtaactctttttctgtttactgtgattacatgacctggttgattaacataatggtctgtttatctgtagtgtgggtgagttttttgagcgacattttgggaaagaggtaatggtttaccatagtatttctgctttagtggtaaattgtaatgttgctgataattatacttcgctgcagtttgttgattatctaattgatccttttgtcgcgggtacaagtggaggagatcctcagtctctttctgtaagtgaacattttgtgcttcactcccaattttttggaggctggaaatagattcttttccagttgttctgtcaaaaatagatgtagctttattttgaatttgaagttcccaattgttcattttgactattactgattattgctaagagtggcattatgctattatgctcctaaaagaaaggtgaattttgacctacatatagtataatgtatcaatattggtttaattgtttgttcttttgttccttttggtgctcatcttgcgccttgttctcatcgctcgttttttcatgttgcacttgatttaaatttgctcagcttaacttgtctttttgaatttatattacttattgctatattttactaatttcgttgaaactaattttttgctgaacttttcgttttgttgaaatcatttttctgaattaacttgattttcctgaatagaattgaattttggtgatcttaccttttctgcagccttttatttctttcttgtcctttttccaatctcatttttttatatttccattgtgttgacatcttatcattaactgtgcagatgcgtcatgcatttccagaagtatggaatattgagaacaagtatggaccataagacgtttattttaatcgacatgtatgtttcttagtttatacatatattaattctgtggtaaaaaaaccgaacaagaatatctttttttttttctatcatcaaaaagggtgaatatatgtagaggaaaaagatttgaatcaagatattagcctaaagcaataataatgttagtaatagctttaataacaaattcaaaacgtacattaatgaaccgagaggccggaaaatagttaaagtgaccactaagagaagcgaaggattcatgatgggttttcaacccagtagggcaaatttgttcaatgttctttacaaatcaagcttattaccttgtgggtgtttttgctagagatgaatgatagaattttccctagttggaagtcttttttggttactttatgggagctagtgatgtaatttgtttcgccttatggcatttcctaacatgtgcttttgtgatgtattgaagctttttttttgccttaatttatgctggattttaattttgttctttgtttcatttttcttgcttttgaaaaaaatatatagatatgtatatattaggattggtcgaggattttgagggaagggaaagacctaagaaaacttggatgagggtgattgatagtgatatgagtctatttgggatcgaagaaaatattcctttggataaggtgtagtggagggttgagggagcaaatttatgcagattagcttgacttaaagtttttctttttgattatttttcatttacttgtgttttgcaaacatttactcatgaatgatgtaaacttcttcaaccaaatctctggaaaaaaataatctacatggaaaaaacattattaatgttaacttgacagagatcccatccttgtgaagcagctagcaattaggcatctaacaattgacattttaatggacaggatagaatgtctcttgatagtcaataccctctgtttcattgtatcccatagctactaatctagtttgtatctttccaaagaaccattattttgaagtttcaccttgaacacccattttgaaccaatatgtttcttgcccttggggagaggggctaattgccatgttttgatgcggatgcaaagacacttgttctacctgagcctattgacttgatcatggatactctagggtttgaactcaagggaaagaatcaagtcttggcatgtgtggtgacatggcgtggggatggagtaaagaagagtcatagttctgttaggatatgttcttgcttgctacatagaatcgtagttctgttaggattgctatgatattatatctagtagatagattttatagttaattaggataaacatgtgatgatcatgttataataggcatgtgattagaggataggattagcttaattcttatcttgttgttagtttaattcttatcctagttttatgtttatcttagtcgaagttgtagccatataaagggcgttccattcattaataatacttagttttgctttgtgttttaaacatacttcttgattattgtttgcttgtgagctaactaatcaaaccattaaagacttttcaggagttttagtgctaaacatcttaatttcaggagtgattttaagagcgtttagtgatcttgaatcaagaaatatccttgttcttgttcgactaatatcagtggttttgttcgagttcttggagttaatctcttcaagattcttattcaacttgattgttgagcttattggtttagtaatcatatcaagtggtatcagttttccagggaggagaggatagataggattctctttgatcaacaaagatccaagggctatcaacaaggttcaaacattgctgcttgttcaagacttgatctttttctaccaagatgcattctttacgtcacaaggtagtaataacaagattaagagtggtttttacatccaagaatcaatctttcacgtccaagatttcatctttcacgtctaagattcattctttaagatcaagaaagttataacaagcatagaagaacacataaccatggagtccgagatggacaagcttgccaaagctatgcaagcacttgcaaagtcgcaaactgaatcacagagtcgactcaatgagaatactaccacaatcaatgggattggtagtaacatgaataggttggaggcacgcatggatgccattgcaaccatcatacaaaagaagcttgatcggaatagtgccaacttcataggtgccaattcagaggaagagttggcagaacgtgaagaaagatcatccaagactacatacaatgatgatcgtggcttaaagttggatgactataatggagatagcaatcgagaagacttgttacagtggattcgacaacttgagaaggtatgtgattatagaggctttgatgacaagaaaagattcaggattgcctccataagactcacgaaatatgctggaatttggcttgaaagcttcaaggcacaacgagccaagaaaggtaaagaaaagttgtgtagttggacaaagttgaaagttcaagcttaaagagaagttcttgcctagtgactatgaacaaaaatagttcataagactctctactataagccaagacacgcttagtgtacatgagtacaccatggaatttgacaagctagggcttatatttgacatagaggagaaagaacaatggaagattgcaagatacatcaaaggcttgaaccgccacattgccaagaaggtggaagtatccacttatcacacctttgaggatgtgacaaagttggctaagaagtttgaagaacatgagaaggaagagaagcctaagagttcttacacgcctaagtatgatactaatgctaaggccaaggctagcttcctactcaaagtggtatgaaggacctaagaggctaagaacctcaccccacctaaagaagacacaagagttgagaagcctaaagtcgtcgttccaaaggagaaatttgaagagatgagaaagtgcttcaagtgtcaaggaaggagacacatagcaagcaattgtcctaacaaaagagtcctcaccatgagacaatacctagctttgcaagaagaggaggatgtctattagttcgtccctgatgaagagcaaacttaggggaagaagaggaggaggatgcttttgctgaggatgatgcaaggctagtaggggtcaagaggcgcaccttacatgtcgaccatacacctagcatggagcaaatggaaaaatcttttccacactagatgcaaggtaggtgactatatatgtaatggtataatagatagtggttcttgcactaatgttattgtatctgaggtagtgtcaaagctaaacttagctacaagggcacaccctaagccatacaagttgagtttgctagatgatagcactggcatgagagtaaagaaacaagctttgatttcattctctataggggttataaggatgagttatggggtgatgtattgcctatgagtgcatgtcatctcttgcttggaagaccattgcagtttgataaaaaggtcatccatgagggggactctaatgtgtactctgtgttggttggttctaagagggtatgtttgcatcccttagctcctcattcagtggcgccaaagcaaccacctaagacaccaagttactttctatcttcaagggagttcgaacaagaggtggaggaagaaggttgtgcttatgccttgattgtaagacatgctgccacaagtgtcaagactactagcaatgagaagctcgaagccttgatgaaagagtttgaggatgtctttctagaggaactacgacccttgagaggcatagaacatgctgtagaccttgtacctggcgcccctttgcctaacaagcctgcttataagtgtgatccagtggcatctagggaattgcaacgccaaattgaggacctaattgaaaagggctatttaagggagatcatgagtccatgtgttgtgccagctttactagttcctaagaaagatgacacatggaggatgtgcatagatagtagagcagtgaacaacattacagtcaagtaaaggtttcctatgcctagattggaagatatgttggataagttacatggggcatcaatcttttctaagattgatcttcgaagtggctaccaccaaatgaggatcagagaaggtgatgagtggaaaacaacattcaagaccaagcagggattgtatgagtggatggtgatgccatttgccttatgcaatgcgccaagctctttcatgagcttgatgaatgaggtacttcgtccgttccttaacaagtttgtggttgtttacatagatgatatacatatctatagccaaaatgtggaggaacacttgttgaacttgcgtagcttattcatgaagcttagagagcaccaactctatggtaagattgatggcgacgaggttgacgggggattatggcggcagtgaatcaccctctttgccggtcactgaaatacaacctgaggtatctttaaattctgtaattggattgactaacccaaaaactatgaaattgctgggaaaaattgctggatgtgaagttgtggtgatgattgaccctggggcaacccataattttttatcactagctactgttgagaaattagctattcctgtgtcggaatcggaaggatttggggtttctctaggggatggacaggcggtgaggggtagtggaatttgtagaggggtgttattgagtttaaatggtggagttgaagtggaaacagattttcagcctctgggtcttggtaattcggacgtgattttgggtgtacagtggctggagacgttggggacagtggagagcaattggaaaacacaaacaatggggtttgaaatcgagggtgtcaagttcactttgaaggtgacccatcactggcgaggtctcgaatctcactcaaagccatgatacgtaccttatgtaaagagggtggaggtttgtggcttgagttgaaccagattgagcattatcaggagaaaacaccgcattcatcagccttacctgaaattccagttttcttacagagagtccttacccaatttcagtctgtgtttgctacaccagaaggcttaccaccgataagagaacatgaacatgcaatagttcttagagaagggtgtaatccggtaggggtaataccgtaccgttatccacagttccaaaaagatgagatagagcgcctcatcaaagaaatgttggcttccggaatcatcaatccttccacgagccctttctcgagcccggtgatattagtgaagaagaaagatgggtcgtggcggttttgtgtagactatcgggccctcaataaagaaacggtccccgataagtatcccattcccgtgattgatgaattgttggatgagcttcatggggcaacacttttttcaaaactcgacttaagggccgggtatcaccagatccgggttaaggccgaagacactctcaaaacagcttttcgcactcatgaggggcattacgagtttttagtaatgccatttgggttgacaaacgcgccggcaacgtttcaatcccttatgaacgaggtcttcaaaccattcttgcgcaagtttgtcttggtatttttcgacgatatattggtctacagtagttctgccaggaacatgaggagcatttgaccttggtgttgcacaccctagcagctcataaattgtttgtgaatcagaagaaatgtgattttggcaggtcggaagtagcatatatggggcatatcatctctggtcaaggggtggctgtggatatggagaaggttcaagcgatggtggaatggccccttcctaaaaacctccgggaattacggggatttttgggccttacagggtactaccgcaaattcgtacttcactatgctcatatagccaagcctttaactgatcaactcaagagagatgcgtttgggtggtctgaggcagcaactcaagcctttgaaaagctcaagaaggcgatgatcacatcccctgttttggcaatgccggacttccaagagttgtttgtggttgagaccgacgcatccgggtatggtctgggggcagtgttaatgcaaaacaaccgacccattgccttttacagtaagttgttaggtgcccgggctcaattaaagtcgatctacgaaatggagttgatggccatctgcatggcagttcagaattggagatattatctgctgggtcgacatttcctcattcgtacagaccaacagagtttacgtcatctcactcagcagcgagaagtaagtactgccttccaacgttggatgagtaaacttatggggttcgattttgaaatacagtttaagccggggtgtgccaaccgggtagctgatgcattatcccgcaagacagtgggagaggttgaattgggtgcgctgatattaactcatggggtggactggaccgacttggagcgtgaaattgaaggcgatcctctgttgtgcaaaattaaacaagacttccacgggggtgctattactcctgtgcacttttctttggtggacaacaagctgttgttcaagggtcgatacgtgattcccagctcttcggtttttattcctaccttgctgcgagaatatcacgattctcccattggagggcattcgggggacctcaaaacatatctcaggatggctgccgactggtattggaggggcatgcgcaaggatgtggcgcggtatgtgcaacattgtagcgtgtgtcaacaacaaaaaatgtctcaacagatgccagggggggtactacaaccactccccataccttcctcggtttgggatgacttgtcaatggacttcgtggaaggcttgccatcttccaagggggtaaacaccatcctcgtggtggtcgatcgtttgtctaagtacgcccacttcctcccactacgtcatccatttactgctgtgtcggtggcaaatgtgtttgtcaaagaggtggttcgtttgcatgggtttccttcctccattgtttcagatcgggatcgaatttttatgagtgtgttttggcgggaattatttcgtttacatgacaccacactcaaacgaagtaccgcgtatcatcctcaaacggatggtcagtccgaaatcgtcaatcgagctctggagacttatttgcgttgctttgtgggggaatacccgcgctcttgggctcagtggcttgggccgaattttcatataatacttctcctcatctctctaccaaaatgaccccgtcaaggtcctttatggtagagaccctcctactgtgatacgggttaatcggggagcctcacctgttgaaagcttggaaaacatgctccaagagcgagacgcagtattagatgccttgcagattaatctgattaaagctcaacagaaaatgaagagtagtgctgatgctacaagaagagaggtgcattttaaggtgggagatcgagtgtacttaaaattacagccttaccgtcagaaatctttggcttaacgcccttatgagaagttagccgcccgtttctacggaccatttactattttacagaagattgggcaagctgcatacaagttacaacttcctgtttctagcaaggtgcatccggtgtttcatgtctcccaactgaaacaggccgttggttccattcccgtttcagccactattccagagcaattgtcttctgacttggagttagaggtggaacctgatgaactcctcgatgttcgtagtgtttctagaggccagcacacttacttggaagctctcattcagtggcagggattaccatcattcgaagctacctgggaagatgtggctgctttccatcaccattttccatccttccaccttgaggacaaggtgaaactttgggggggtggtaatgtgatgcaccaaactaccactccactactcacctattagaggcgtaagaaaaagggggtaaatcaggaatagtttacaaattctgttgaaaggaatattttgtaattatgatgtcagaggttgttagcaaaaaggcagtagagtaacaataaaaaggggaagggaggagagaagaaggtattgagatttttgtaaggaacttggcccttgggagagttgggagcctctcgaaagctcaccattatcttgtgaatattttccttcctggttatatacaagaaccttcctctgtcaatttcttttctctctaatcttatttcttattctgttttctggttgccattgtttgaagttgcttgttgtgcttgagtaaatacgtgaagtggtgaaacccatctgaattcatcacatctattccaagtggtataatacaagcttgtaatccaaatctaatgagaaatctaagttatgaagaatttcaaaagaactaagtacccttgttttggatgcccaaggatttacttgccgctcaagttaatgctcaacgtgcaagatacaacctctttagtatcccaaggtagtttccataagaattaattgagctcaaatcaagaacaatatttttatgtattaatgtgaacacttcctgaattatattagatatatggtctgaaggttggaagaaagattagcttttaattttaagtttgagatagtttttagaatcgaggaaagattagctcttaacttgtaaactaaggattgctttataagtaaaacattagttatggaactcttaaaattggttttgaacatttctagttaaaaatcccatgtaattctcccaaactagcttaaaatctcacatttcacaagctaaggagagacaaatggcgttctcttgtgaaacaatctaaaattttcattaggctactgttttcaagtatttatatgttagaagtgccgcatataggtacataaaataagtttacaaacacaagtaggaataaggaaaactaaaagagaaacttcagccatacaaaaccggctgaaatcagctactactttctactttctagcttcaaaatctgattgcaagtctcctttaagccaatcaccaatgaaaacctttcctccacatgaagtgtgctcaaatcaagagaagaaacccatcattcgcctatagctacctgggtcagatgaagatacggcaaaaaaaacgctggaaatcagtgaaccaaaataagcaccaattggatgctttctgtccttgctacattttcttctcataggactacttcaagccatacatgaataagcagttagatccagctcctagcatccatttgatcgtacaaatgagctccaaaaagataagtaaaaccaagcagccaaaacctaattaatactaatgatgaattagttgaatagctaatgacgatgaagcaacactttagtaggaatagtgttaattatgatcaatgctacttaatcttctgattaatttttggaaaaatgtcatatctaccttctgtatacacttattcataactatatcgtattattattatttttaaataactaccttttaagtaccaaaacctaagaaatcaggcacttgatggattccatccaaagatccatttggcggggcccactaactgacttttgattttttgcctttcctcttttggttaatctcaatggttcatcaataacaactcaatcttctccccatttcatcaaatcatccctaaatcagaactttttcaaattcacccaaatgaggttatggaaacctctaccaagtttattcgaccacttttagtctagctcaaagttttacacttgcttcaaaaactaagatttattaactttagaaattaggtttttatttttattttttatttaactttgtaacaatcttaaataactcaggtgctttctagagtttggctttaattgtttttcccttggttatgtgaaagaagtatgactactttctccaagactaaagtagagagcaaaaaatgcaattctggaatttcttgcaaaagaaaaggaacgagttaatgataatgaaaaacaaagaaaatgatgagaagagaggagctgaatcaatcatgatcatgtattttaaagttttttttgctattgaagtgacttaagaagaggaaagaggatgagtgaagacaaacaaaagaaaggataaatagagggaaatcttgggcttagaaaggtgaaaaggtaagaagatgagttagtgggccccaacaaatgtatctttggatataatccgtcatgccactgtttggggcttgcttaagtccatacattacttcactaattttacaaaatttattttcttgaccaagaactgaaaaaaccttcagtggtgatctattaggttttggaagttaaaaggtagttatttaaatgtttttaatataaaaggtagttatttagatatttttaatataaaaggtagttatgtgaataaaagtgtatataaaatgtaattttttgacatttttgccttagtttttcttgctaattcaccttttcaacttgaccaagttgctatgaggagaaaacgagcaattattaagcaaatcgcaacactagcattaatccatggcccatgaaactctccataattagagattggattagcacttagtagaacttcttgctcctgctccaggtttccattacttctttatctaagtgcatcaaaaggttgttgggttatgaaaggtggtggttgtgtatagtcattgtcaaaatgttgttaatgcactctatttagaggatgagggattgaatagttttcacctcgtgacctttcattcctttttaaaaaaattgataatgtgtattggtcctatgactgtatgaatggtaataagctatctcatgagctgttactatcttcctcagagtctaggtagaagggtttgggctgataattttctactatgtgcaattagtttgttggatttggatatgctagttgatataggtcctttcccttgggccttctcttaatataggcctacagtgtgattgaagataaatcttctggagaatataagaacaatgagatggattggttagaggttgatttgttcttttggtgtaagactatttcgggttctctattggttatgttcagacgccagaatatgtgttggtgattgttttccatgaacatactttatccgcagagacatttttcttttttcttcctataagattatatttgtttcctctcttggtgctcatctcagtgtctctactttacgttaaactgttgacattacttgacaatgcgtatatttgtcgcatggtgctcttccctcactccacgtcgaccccatacatcaaaaaatgccattaaagaatattcgaactcacaaccttgtgttgaaagaatggaatccctaccaatgactcattaattcattttctctttaagaaataaatgatttcctcacaaacttttaggctttaagagcccaaaagataaaaacataaaataagatagacatcaacgtcaagattagccttaaatgcacaaagcacatgtcaaatgattgataactactcacgagttgcaactctttgggcgttgcctaatattaattggatctcttttaaaaattgttggtggttatggttggtggagaggaccatgtaacttttagctggtcacaactggtaatgattgtcacttttactgcccataaaaaaatttaaactgttgaatatgtttctggcagtggatctgacaaatcctttacaagttggcgtccattttgttttgccatgtgactcaattataatacgtgagttttattatccaccaggtttggctcactaatttccggattaattcaatctaaactgtctccaaagaaggaaaagggtggaggaggaaagccttcttctaatgaaaagacacgcatacgtggttcgttttctttccagggtggaatgcaggtattagcatgtagctttcattctgttaacatttgtggttcttccagacatacatccaatgctttttttttttcttgctataaccataaacattcttgtcatgaacattctttaatactgttgctgagcttagtgtattcgttcattcatgtaatttcctctcttgaggttaaaatggcatacagccttacaacctatatccataatgctccttagagtagaatccctaggttataacatagtaccacttatcaaaataaacatggcacacactgcaggacaagaagtaaatccacctagagaactgagcacctagtagtaaaagcagcgatacattactaataacagtagcagggccataagagtagtaaatgggcctcatttcaacactccccccgtaatggtgagagagaagaagcagtctgaactcccagcttggagagcaaaatagagtgttgctgaacagggagaaccttagtgaaaacatctggcacttgatcttgagatggaacataggtaggctgaataaccccttcttcatttgtattgtccctcaggaaatgacaatctatgtctacatgcttggttttctcatgatgaactagatatgctgctatggcaagagcagcttggttatcacagtagataggagtagcactggactttttaatgcgaagatctttgaggagttgtttgatccacatcacctcacacacagcaagagccatggatctgtactctgcactgaccacaagaaattgcctctttgactttcaagatacggggggagtcaccaaggagcacacaaaaccagatgtagaatttacaacacccatcccattcactatcacaaaatgctgttagttgagcactagacttgttcgccatgagaattcaccctgttggcagcttgaagatgcacattagtggggcagtgcataaatttgcttaaatcatgtatagtgaaggcaatatcaggcattgccttgtaatagtgagataaatgagcttccccatcaatttttgatacacatcaggttgttgaagaggatcaccattgtcagcatagagcttgacatgtgagtccatacgaagcctcaatcgtctgcaatttataaaaccatattcatcaacaagacccatcacatacttctttagagataaaaacgatacttcactacactgatccacttcaatcctcaaaaaatatcttaggccacccatatctttcatgtgaaattggccagcgaagaaactctttgcttcctcaatagttgctaaactattgccagcaagaatgaggtcgtccacatacaccaatatagcactgaaacagtgagagttttgcttgaagaatagagagtagtcacacttggattaagtgaatacattttgctttaaagcagtgttagcttggcaaaccattgcctcaaagcctacttcaagccataaagtgacttaagcagcttgcacaccttagttcatttggtgtcacttctgccatcagtacttagctccccctctccttgaactttgatcctgttacatgtttcactatatcctggtgatagcttcatgtatacactatcctacaattcaccatgcaaaaaagcatttttaacatccatttgtttgcaagaaccaaccctctaaggatgcaacaacaagcatgtggtcatctttgctacaggggtaaaagtctgctcataatctattccatatctctgtctgtcacccatgattacaagccttggcttatgcctattatttgtgccatcagtgctgtattttgttctgatccatccatgtgagggatggctcatttctacaaaatcctagttccgttaggatttgtgttgttttcctaattctagtaggaataggactcctaaaatcctaatcctcctagttctgttaggagtttaaaagttttagtttgattgtaattctagttgtgttagaaatccaaatcctagattcatgtcacgtatggttagaacatggctagtaggataatttgtcttgtgatgtccatagccttggcatttgtggcacctaactttcaatagcttgtcttctgtctccttttctttctccttctttgaggaatcaacgtttttagagctatctaaaccactagcatcaatattaggtttaaaagtgctaaaagatttcgaatagttcttacttgcatacaatttctttttctagtttatgtagcgtcaccagggaacaaaaactcggccgttccgttctggaacggccgctttgtaacggatttcagagaggccgttccgttaaataccgttctagaacggtgatttggaattcacaccaaactcggcgcgatagcgttacgtaacggtgtaacggcgttccagaaccgttacaatcacataacgtccgttatttgaagaagaccagttcttttggtggaggaagaagaagagccaacgcaagatctatagatctgagttaaaatttgaaaataaaacatgtttttttatttaaattaaagcttacagaggatgtagaactcaaattcgagtaaacccctcctttaatttcattaggttactgcaaatcgaaccctaaattgcaaaccctaatttcgaaaaaaccctaatatgcattgggatgcaacgctgcttctccggtcatggcagagaaggtcgacgagtcatcttcggctgcttttagcactgtagctgccggtggttggcttgtttgcaggttagtgcttgctggttttctttctctcataccgatcatcttcttcttttctctcttctctttttcttttttattgtgtgactgccagtcacgtgataattgcaactcataaagtatctctttctctctcttcttttcatccctttttatttttctttcccttttagtttttattccctcacgtggaatcacctaattttcatccttttttatttttttagttacactcttacacagaagtatgttcaaatatcattatagtacctcaaatattgtatttataagagttttggacataatatgatatagaaagtaaaatagaagaaaaataaagtttaaatgtcacttgtgtgatttttttaaaaaaattcacgccgcgacggccgcgaaacgttctatttcccgttacaagccgttcccgcgataacgcgaccgttcccgcgaacgcgaccgcgaccgcgttttttttccttgagcgtcacatcttgcaagcttcttcaaaggtgagttatgtgtacaactccaatttctctccaatcccctccgtcctcatttaggcctccaaggaagctacttaaacattgatcttcaagttcatcaattttccaaagaatggataacttctcgaactcctttatgtaatcttcaacggacatattcccttgtttaagagtagaccattccatgtacaagctttgtttgtagttagaaggaacaaaacgtcctcttaacaactttttaagcttatcccaagtagagattttgggtttattagctttcacacgctgcctctttactccatccaaccaaatagatgcatatttggttaccttaagcacggccaccttgtatttcttttcttttggtgtctcttaatcccaagtagagcttttgcgtgtgaaagctaataaacacaaaatctctacttgggataatcttcttcttgtttccgaaacaactaattcttatggtagttaggaaagcaagaatggtttctaattcaatagggaatatattaattattattagtttaagttaaatagtgcacgaatctaaatagattattcgtctcaaaatctcacttaagtatagatttgtttggacatctgagggaagaagaagagagcgagataaaggagaattatcactcaatgaatccatatcccgagttttcccatttacttctttgaaagcaatatagttcacgaggtcttattatcagtctatggacataagagtaataatttaagggcaaaaactatgactttatgggtttaaactgatacatgttctgttaaactgatagatgttctgtgttaaaccgatactcatatattcctggttaaactgatagatatatgatttaaattgatacccgtctcagtcatgtcttggattgagacggtctgacacaagactttttgtgtattatatatctgattagaataaatttatcctgtttactaattattttatcttctccagacacttgttgacacaatatgcaatcagtttggtaaagatgaactcaaactacagtgcaaggtcctttcattgtcctacagtcataaggggatcccttcttcagaaaattgggtcgtgtcttctgtgtcaaaaaattccattgaagatcaacaatatgatgctgtcatcgttaccgtgagttttactttgcttactgctattgcaccaatctttcttcttttgacacactgataatggcaatgctgttgtggtttgaagccatgttatggggttttagggatatttatggagtctgatctaatatgttattggataaaattcagatctgtaacgtgactcaatgagattgaaaaaaattgaatcaagataatggattggaaaattaggagctaacctagggtctataagcgatccacttggagtctcataccaagcaggtattcgacattttaggtttatattgctgctatggctcatatgggagcctacatagggtctggtgcttattcctttttcttttgtctagttttggggctgcacatttctgttgtgttttgatatggatagccatcacctgcaattgcatggaggctgaactaagttctataggggagcaaacagtatctgttggaaatttattttcatattgtgtttttaaatgctataatccaaaatttgttgttcccctaaaatgcctaaaatacccttatgtaactgctccatctgtcccttaatagacttcccatttctccaatgcatgtttgccaatacacattttgtattgttaatatcaaaaattacatattagtaaaaattataaaagtttgattttcctaatgtacgcaatgagacgaatcaaacaagacgccatatgactatgttttttcttatacttcctatgttttttaataagtgacatgttttccttttagggaaatgtcacaataagtgacacatagctcaaagtagtaaaaatacttctcatttattacatctttgccattatttaattgtttcacctacctactttatccaatactcaaatttgattggttgaacaattggtcccaactttctctagactccttggtattccctttcccccactttctctctgtgtcacttattaaaaaatggaggacgtatattggaaaaaaattggaaggttttcttcacttatgaatagtggtaaaattagagatgggaaggctattttgggatggatggagtaatatttaaatttttaaaataatgtcattgttttagtgatgaaataaaattcaaggctattttttctagtaattatgttatctgtacatcaccacacgtatcgcgtgcatataagactagtttgatgatattccaacactgttcgaaggaagtcaggcatggaaccatgtttgcttccatatgggaaatattttgcttactctccttcaaacatctacctcattatcccagaatgattgatcgaatctaatacaaatatacaattgatcatatgccaccagggaattacatcaaattaaatttttatagaaggggaatcagtcatagcctcatagggaacgaataagtgatactcgccagtttctttcctggttacttttcctcttctcactagccatcctttatgtatgggtatgctgcatcattcctgccactggttgggactcccgtttgaactatggggggatgggaaagctaagccatcatcttcaaattgagtttcttgagaatgtaagacaccatctgtaagatgaatatagtgcactctatagtcaatgtcatgatctttatgggtttatctgctgaaataactgtgatatacccagctctccatttacaaagttttcctacatattaaactcttgcccgcaattctagaacttcattgtagaacttttcctacataagcatcatttgtcttttctgtagtaaaagttagaaagagctttattttagaacattcgtttttagttttctttgttgttgattactccgccacttttaatacttttatgattcaagtatttgacaaaatcatgtaatttaggtcctctgctgcatgcagtctataccctctctctctctctctctctctctctctctgtggttgtgtcttacttgttgagttactaactccagccattacataaagtaggctggcattatgatgagcaaattactcaagaccacatgttagctcctttttcttttctccttattctgaaaggcaaatataggtccatcttggtgcttctcatgtcataagtaagctgaccccctccttttccagggaataggacaataatccaaaagtgagggttttacatgttgggatttgtgaagtttcttattttacttaatagccgagtcagtgttacaatacatagtaccgtgttacaaaatagtatgtaacaccaagcatgtttatgtgcaaaattgtgcaagactttgttgctggcacgccaagggctgttttaatgtagtttacttattcttttaggtttttcagatgacaatcataaagggaattaggagtgtttttattgtagtcaatccctattgtgctacaacgataaaagaaaaaagcacaagactagaaggagaagtaatgtctaggaaagactcctcacctggggttgctagtcacctacacatcttagaaggcatcaaaccaaagcttattcccctcgactgttttcgggagaaaagaagacaaaattgtttctaacttatactttaccagtttcactacagcatcagaaagaagcaaaatatgctcccacaacacggcgaacctagctttccagatgtgataaaccagaccagcaaaatgattattttcactagagctttgagtctattttttcggtttttccccttcttcctggtaatgtcacgccaccaagccatcatctcaattttttgagatttgacgtaatcgctcaaatagctgagtaagacacttcttgctctaaatactaataaaaaagaggtgaatgtgggtctcagccatgttactcaaatcggataaagtgtctactcttattagggtttttgggtgttggactcatccatttttttttgtaaaatgtcaagattttggtttgaaatgagagattcaagtgtcgtgacatgagtcggcacgcaacacttaaacgtgtcgaagtaacagagggtctcagacaatcaactttaatcaatcacgaaccccaaaatttatgcaacctttgctcatattcagtctctgtaaagcactcaactgcagcacacccacccattcgcttcacctacagcaggagggcacccaagtaattgctatgatgagcgaattattctgttttgccttgctggaatattgctgttagatttgctgactcactggcagttaattatagtcagagaatgagaaatatcctgtagagagagaaagggtatcttttgtatttagctctataaatagctaaggaagggaagggcattgagagtttatgatattataataggagagatttagcctctcgaatgctgataggagcgtagctcttgttggattatcaatactactctgtttgctctatctatttctactcaggttccttcttgtacagtggatccctgattggatttacttcatcaaccagcagataaaattatttgtaggcacattgaaaccattccaaacctaatgaggccaaagtttatcacaaagaatataggagccaaatgtaggcaacagataagagtataattgccagaagttgaagactccaggtattgttcagaaaccttaatgcatatcatcattctgacactagattttccccggagccaactaacaaaaatgaattaaagagattaaggctatgtttagttcacctgaaattttctgatctgaacttatctgatctgatctgaacttattttttctgatctgatctgatctgatctgaaccaatctgattacaagatcttatcttttagatttttctcaatatataagaaaaaatatagtcatgtggggtcttgtttgattcgtctcaatgagtactttattaatattcaattattataatttttactaatatgtaatgaaagatataatgatttttaaatataagcatgatctgaactgatctgatgtgaacttattttttctgatctgatctgatctgattagatctgaaataagcaaaaataaggtgaactgaacatagcctaagcaacaattgagggaaaataagatcattatggctaagataagataaatatgtaatgataaaatcagagtaattatatcagttacactctcaacattcgtcagattgaggtttcctcccaaaatgccaacccacttttctgtattttcacgtccttctctctacccttctaggtatatattacatcagctgtaaaatttttgaaccaactagtagaatactgatctaccctcaactgcctcactttctcattttttctgggcctttttctctctagcacaagtccacataagtgatgcatagcagaaatataattccactagtcatcctcaatattgatataacaaacacatcacccacatattatcatttttaatcgctgcatgcgaggcatacttacccaccaatcaggatatgcataacagcgttcctaattccaaaaccaccatatatcttgggtttgcaactctcatccctagcaacaaggggactttctgaaaaagtggcagattccgcccacaagtagtttgtacggacacctttattatattattaatatcatatttcggcaacacaaattaccagcccagtaaaacatgaattgacatgagactaacaaggggcccaatctaatatcgtacgtctgtactaagcaatgtataaaaaaaagctcaaggtgcattgatgcaatagggatcctaatgtgcataggtgcgcctcattgaagtgaggcaccactaaggataaataaaaaagattgatgtaaaattaaattgtgcaccttgggtgcgcctcgatgaactttttttgtgtgcctaagtgtacctcaagtacgcctcattgatatcgcctcgcctggcagaaaacgagcttgaccccaatcgccttgctccccaccgcctaggcgtgcctcagtcacactttttaaatacattggtattaagtactcagaatggcaaaaagaaactttgggcattaattagacatttcactttttgtgcaactatttgtgacttcagagattgatatgttttctacattacagacttttgtgatggctgcatggtctccactgtcaaagaacattagtttaagtagaagaaatattgctctattaccttcctccctctacaaacaaaatcctaaaatgtggttatgtagtgccaattcaaacttgtagatgcatgactaatgctttcattatgctgtgggtttttatactatgattcatgtccaattacataacaattagctggagtcaggatatgtcacggaaattttaagcctggcaggatgattgtttatattttctctttttcggtgtttaagtcaaagtaaacttctaggctgctcttttataggctagttgggctgttggggagatctacacattaagtgtgaagaaatcttgtctaactccagtttggttgagaactgtaagctgtcataacatttgttgcatgatgaggccttgtgggattatcatgttagctgtaaactctaaacttacttgaaatctagtgttgtgtctccttatttctgtagtcaaaattgaaccttctgtacgtttttgatacctgcgactagaatgatggaattctgaattactgatactattacaaccatctgctaagaacgaagatgactcttagctaatttctcagcagatttagagaaattaagaagaattactaatgaatatttaaagagaaaactaccaagatatgattgtattgatgaaaaacaccaattacaacctaaccaacattcgagaggttggagctctcccaagtaaccatttctctcactaaacttatcaattttcaagatgccttttccattctcagttcctctatatttatactactccccttagcaaactacccaacttattccccaagtaaactaaagagataatatctaaaatacccttccccctacaataatattagttcttagcattaccggccccctaaacttccaccttgtcctcaaggtgggtcgtaatcatcactaaattctgggcctctactcgtatattcagtgtcttgcagcccttcaggccccaagcctaggttatgcagctcgtgttgcggctcctcctcatatagttctctggctggagtgagtgcctcaactataatgaaaaagtcctggaggtggggaaggaaggagtgtctgaaatggtgtggtgtgctgctggtgttatgggcttgtgcctgaaagttttgggtttaaagagatggagtggagaagagtggagaagtgactggagacgtaaaagaaggaatcataatttttgtaagtggtgggttgaaaaagttggtgggaagaattgtttttataaaatgtagtgtaatggtcgaaaaatgggtggagtaagtatggtttttggctggggatgtggtactgggttgaaaataaataggtctgagcttacttgtaaaattggcctcaacatgagcaggcccaatatcttgagccaattccccaaaagctggcaatagagcactcttaattgcattgttgtgggccatcgggctccaaacatatattcggaggagccggacttctttggtgatgtcattagcttggcccattgcacactttcccttaacagcctcaagatcttttcccacttttgtaccccaaccacgtggcttcaccatcctttctttcttgcttttgtcacttttttggcaatatacgagtttgtccttactaccctcatcttctaatgttggcttcctcaccaagcttaatttctggaattttgtccaccaaatcccaccacccatcgtcaacaccatacctatctacaccggccaagaagcctggtcctccacccgaattttcgccacagacaaagcctgaacaaccgtcagttctctcaccggagaagttcacaggtccaccacctgacccactagttgctgatccacccttcacaaatctccctcctctggctgccacaagtagtggttcctccgtaatactcatatttctcgtccaagagccctggaccaccaccggacccacttccaccggcaccaacttgttcaaatgatacttctctttcttttccaaacagcctacttggactggaaaaaccactgcgattgtagcctccgccagatctgtagcctagtgcacctaacgtgcttccaactgcaacccaatagggatggaaatggatgggattcggggagggtggagcatcacccgcatccgtcacccgcatccattcgctccacccgctccacccgcatccatccatccgtcacccacgggtgaaacgggtgggtcggtgataaacgggtggaaccatttagggggtgtttggtatcatgtttttttacaaaagaaacagaatcaagtaacaaaatccgtttctacttgtttggttctatgttgctcagactcgagtacccatgtccgacacgggtacgtgtccaagtgtccaactcagctattttctagaattttttatattttttaacccaaaacaaagtgtccaagtgtcccacccatgtccgactcccgaggatccgacacgggtacttgaggtgaaatgaagagtccgagcaacggaggtttggttagtgtgtaaagtaacaattaccgttacttgaggaaaacacatccccccaagttgtttccattcaaaaacctaaggaaacaaataacgtttcactcctcaaacaagaggaaagggaatgggttatatttatttccattccattaggataccaaacaactaataagggtaacacttattattatcctttcccctccttatcaaaatcctttccattccgtttacggtattcataccaaacacccccttagtatattttctaatgaaatttgtgatatgatatgcatgatataaaataattctatcaaaaatataaaaagtaagtaaacttacatgtacaacttaatagatgggtgatgggttggaggttaaacgagtgatggatcgggtgacgggtgaagaaattctcacccaccactcgctttccatccatttaaattaggtttttcatccatttaaaaaaccgggttaaacaggtgatgtatgatccatcacccatttccatcctcaaacacatcccgatttgtttactgcaccaccagatccaccagtataaccacccgaaaaatcatcatgccttctactagccttgtaacctgctcccggtgagaagcttcttccacaagtggtggtcgctggacctccatctccttcttccccaaaaaattttccatgacacccactcgacccttcatctgtgacaacctcttcttcgtccacctctgaagttttggggtcgtcttcctcctcaagctcctcttgaagtaactttaacttccgttggatgggagagaacgcttcattgattatcttcaccagatcttcttgaagtttctcgaaactttttctcacgttttcctctacctctttcgtgatttcctttccgatctccttcatttttagactaggagctcttgcgattccatggcagatttctttttttaaaacaagaaaatcaggcacttaatctcccagaatagtggtgctctgataccattttctaagaaccaagatgactcttagctaatttctcagcataacaacaaatttagagaaattaagaagaattactaatgaatatttaaagagaaaactactaagatatgattgtattgatgaaaaacaccgattacaacctaaccaagaggttggagctctcccaagtaaccatttctctcactaaacttatcaattttcaagatgccgtttactactccccttagcaaactacccaacttattccccaataaactaaagagataatatctaaaatacccttccccctacaatattagttcttagcaccatcaaactgggatggatggttttgtaaggttccaatttacttctccatcaaaatattttaggattttttatctcatgtattttagagtttcctcgtccctttttatctgataagattcttctgatgatttgattttatggtaggctccaatcagcaatattaaagaactgaagattctgaaagctggagttccattttcacttgacttcattccagaggtttgtatttttatagtggttagacatgcttcccctagttttcaaagtaaaagcatccttgttgtgacgatattttttcccttgtttttgtttttattattatcatcacttatttccattttctattttccatgctgataagatgttcatcaccataatcttgtggtatcagaagtgtttagtggagtttattcactacacatgcagttgttcttttgccatgaccgccattcattttctcgtcaaaacaaatctatgaagtttggttttcagactcatggttcttgtagctcttgtgaatttttttttcttctccttgcatgcattcttcaaattacatattgcatataccaggtgctctcctttattttatatttaatttttaaaattctatcatatattttttaatgtcaaacctcaaactaggggttcactgcatcttaggcttaccaggctaatatttctttacttaaccttttccctttatatttgctatcctcttgtgtagtaatcaccataagaagggtacaaactaaattaccctcccattcttttgtatcattctgaaatagtgtcacagagctttgatttttttgccctcatttaatctggcaaatgttctctctatttttttttttttactttcttttgacgggattctcaggcaattgttacggggagcagccagtcacactgtttctgtttattatgcaggtgagttacctgcccctctctgttatgattactgcgtttaagaagaccagcgttacaagacctcttgagggcttcggagttcttatcccttcgaatgagcaacataatggactgaagactctcggtaattgtctggttcacgtgtgtagcgaatcagattttcaaaccctgatttcgtaacattgcagcnactctgttttcatctatgatgtttccagatcgtgctttctccgatatgtatctctatactacctttgttggaggaagcagaaatagagaacttgcaaaagcttcaacgtatgagatatgcaatgttttaaatgtatgctatagtcatcgtttcaaccttttggtgcctttttcttactaatttatcctcctggtttaatgatcttagggatgaattggagcaaatagtttcgtctgatctccaccagctgttgggcactgagggaaaacctacttttgtgaagtattgatatctttcacccaacttaacatgatttgtgcttataatatgttaaataaagtaactgaaatcctgaaattaagactacgaaactgtatggtgacagtcatttttactggaacaatgcattccctttatatgggcacaattacgactcagttctgagagcaatagaaaagatggaaagagatcttcctggacttttttacgcaggtaatctgtcatttgcttgttgcgataaagttcatgtacagttggcatatcaatcaacttgcattctttcttgctaactccaaacaatcaggatcattaacttgtaggctgcagcaacagagagtatctcccaagttgttaggtttcatgtaacctcgtcgctgagatgaaatttccgttggctaaaaagtgaaagttttgtattgatgttacccaaaacaaaagtattttgcatgttgcttgaagttttggttgtttcagatagtacatcctttgacatgaaaataaatggaaaagcgtatgtcaagcaattatcatctagtttctttgtttctagatactagccgcatttgatcccagatcatttttgaggaagtcagctgaaataccgtagctatccttcagttttcataataaaactttaatggatctgatgtacagtaatttagtgtgcaccgggttaataattgatattaacttcatatagtgagtcttataaagatataatgaacttatatacaatatagtggattttattaatggaaaacatatagtgaaactatatgcaatatagtatgatacataaagacttagacaacaagagcattcgaaattacaaagaacaaaggaaagaacaattgtatcaaaccggttcgaatgaacaaacaaccaccacttccacaatcaatgtaccaccaatcaagactaaactataacaatgagcttctagtttaagtctactttgagttttaatcaccaattcaacgattagatgatcaaaattgcaaaggttaagagttggtcaaacctaaccaagagttacactaggcacatagctttgttaggagtatattagtttatgaattctagttaagttagaaatccaatacctagttggattaggattcctaattggattagaattatagtttagttagaattctagtaatagtaggcgtgtgattaggagatataattagcttaattcttatattgttagtttaattcttatcctcgttttaggtttatctttagtcgaacttgtaccctatataaggggcctttatttcattaataatatagtttattttgagtttaaacctttacttgtgattgtttgcttgagaggttattaatcgaaccattaataacttttcaggattgttaagtttttagtgttaaacatcttaatttcaggagtgattttaagagtgtttagattcttgtattcaagtttcaggactgatcttgaatcaagaaatatccctagtttcgactaatatcataagtagttcgaattcttggagtcttttcttcaagattcatattcataacttgattatttagacttcttggttttgtaatcatatcaagtggtatcagttttccagggaggagaggatacaaagggttctctttgatcaaagaagatccaagggcatcaataagaatgacacttgcaataagttcgagtgatacaaacaacttcaagactcgatcttttgctaccaagaaccaatcttgacgcctgaagattgttaggacaaaggataagaagtgtttctacatccaagattgcattctttacgtccaagattgcgtcaagatccattctttaagttcaagaaaggagtagaaagcattcgaacactacttaaacatgacatccgagatggataagctggctatggccatgagtgccttggcacaatcacaaactgagtcacgcaaccacatgggtaggatggaggcacgtgaccgtggattgaaactagatgactatagtggagatggcaatccagaagacttgttggagtggatttgccaactaggcaaagtgagtgattataggggctttgatcacaagaagagattcaaggttgcttccattaggctcacgaagtatgctggaatacggctcgaaggattgcatgcacaaacttcttgcctaatgactatgaacaaaaacagttcataaggctcgcatcaataagccaaaacacacttagtgtacacgaatacagcatggagtttgacaaattagggcttatatgtgacatagaagagaaagagcaatacaagattgcaatgtacattaaagggttgaatcgatatatagccaagaagatcgaagtctcaacttatcacttctttgaggatgtgactaaattggctaagaaattcgaagagcatgacaaagaagaagggcctaagagttcttacacacctaagtatgactctagtgctaaagggaaatcaacagttccctactcaaggtggtcggaaagacctaagaaccccactacacctaaggaggacactagcatggagaagacaaaagtggccgtacctaaggagagtttaattttgtgttttatacatctttgcttaagagcttaacaattgaaactattaataacttttcaggatggttaagtttttagtgttaaacatcttaatttcaggagtgattttaagagtatttagattcttgtattcaagtttcaggagtgatcttgaatcaagaaatatccccttgttcaactattataattgatcttattcgagttcttggagttaatttcttcaagattcatattcatacttgattattagacttcttggtttagtaatcatatcaatatcattagcattaatttacccccagggagattaagaaaggattagcctaatcaaggcgcttaagaagtttttaggaaaaatcgtgcttgttaagcttaagaattgaacttctttcaccatttgcccttgattctcttgttgaactagaagatcttggttcatagtagatgctcctgcatcatagtagagcatttaattttaattttttaacatgcacgaagatgtaggtagtgtagtatatatcgtgagacgtggtttaacatatagaaagatgtagtttctgcatgatatagtgagtttttgcatgatatagtgaatgtctgaatgatacagtggatcgttccgaattgttgtagtttgtatgatatagtatttttgtgaatgatatagtgagtttcttcatgatacaatgggtttctgaatgatatagtggattgcttagaaatgatatagtgagcttttgtatcatgtagtaggtttctatgtgatataggttgttaaaagatgatacatgcttttggcctcatgtactctaatgttaacgtgaacccggtccttgcaagtcaattgcagttttttcaatattaagctatttttttttttttttttttttttttttttttttttttgtacgggaatatttagcatctttaccacaaacataaccatacgaatattatgcggaaattccagtctgaagtcttaacttttcaaaattaaaagcttctatattatttttggaatgaaaaaaaatgagctatggcatgttattttgaaatacaatgagtctcaaggtgcatagtggcttcaattctacgaataatgaatggactactgatttctaattttttgttccgggcttttgcattaggtaaccataaagatggactctctgtgggaagaactatttcctctggatacaaagctgcggagcttgtgatatcctatctcaactctacttaagatgcctaaatgatcgaggagactccgtaagtcctttctctgattctatctttgaactgagtggaaacacgactgtggtctaaagtagttgatgtctcagatatccagaaatggcgttagtgatattcaggagctgtccattgaccctttgattcattgttgcagtttactgaaagttgttagctggtctcagaaaaacgaaaggaaaaaagggggaaaacaaaaacaaagaaacgtagattgtggtgttaaaatcaagaattccagagatttgtaccttctttatcagttgaattgtttacagtgtgaatcaagaagttagctcgaccttcttttcttgtgaatggtaagatttcgtgatcatcaatacttgattgtgctgtttgcaacttcaacggtaagatttcctgatcttacagtttaattgcttgtgctgtttgccactt

SEQ ID NO: 39 - DNA, 1575 bp, synthetic construct
  misc_feature 1..1575: note = G398A mutated Beta vulgaris PPO2
  variation 1194: note = n is any nucleotide
  source 1..1575: mol_type = other DNA
atggtaatgctatacgattctcacctctcaggagtctcaactcatcttcaactatcgcaggcatttcccaggaagaacccattaatggccaaagtgtctgagccgggtaaacccacttctgctaaaaggattgctgttgttggtgctggtgttagtggacttgctgccgcatataagctaaagtcccatggcttgagtgtgacattgtttgaagctgatactagagctggaggaaaactcaaaactgttgcaaaggatggtttgatttgggatgagggggcaaatactatgatagagagtgaagcggaggtcacgagtttactcgatgatcttgggcttcgtgagaagcagcagtttccaattgcacaaaacaaaagatacattgcgagagacggtcgtcctgtgctgataccttcgagtcccattgcacttctcaagagcaatatcctttcagcgcaatctaagctacaacttatgttggagccattcctttggagaaaacgctatgcttctaagatttctgatgagcatgctcaggaaagtgtgggtgagttttttgagcgacattttgggaaagagtttgttgattatctaattgatccttttgtcgcgggtacaagtggaggagatcctcagtctctttctatgcgtcatgcatttccagaagtatggaatattgagaacaagtttggctcactaatttccggattaattcaatctaaactgtctccaaagaaggaaaagggtggaggaggaaagccttcttctaatgaaaagacacgcatacgtggttcgttttctttccagggtggaatgcagacacttgttgacacaatatgcaatcagtttggtaaagatgaactcaaactacagtgcaaggtcctttcattgtcctacagtcataaggggatcccttcttcagaaaattgggtcgtgtcttctgtgtcaaaaaattccattgaagatcaacaatatgatgctgtcatcgttaccgctccaatcagcaatattaaagaactgaagattctgaaagctggagttccattttcacttgacttcattccagaggtgagttacctgcccctctctgttatgattactgcgtttaagaagaccagcgttacaagacctcttgagggcttcggagttcttatcccttcgaatgagcaacataatggactgaagactctcgcnactctgttttcatctatgatgtttccagatcgtgctttctccgatatgtatctctatactacctttgttggaggaagcagaaatagagaacttgcaaaagcttcaacggatgaattggagcaaatagtttcgtctgatctccaccagctgttgggcactgagggaaaacctacttttgtgaatcatttttactggaacaatgcattccctttatatgggcacaattacgactcagttctgagagcaatagaaaagatggaaagagatcttcctggacttttttacgcaggtaaccataaagatggactctctgtgggaagaactatttcctctggatacaaagctgcggagcttgtgatatcctatctcaactctacttaa

SEQ ID NO: 40 - protein, 524 aa, synthetic construct
  REGION 1..524: note = G398A mutant protein of Beta vulgaris PPO2
MVMLYDSHLSGVSTHLQLSQAFPRKNPLMAKVSEPGKPTSAKRIAVVGAGVSGLAAAYKLKSHGLSVTLFEADTRAGGKLKTVAKDGLIWDEGANTMIESEAEVTSLLDDLGLREKQQFPIAQNKRYIARDGRPVLIPSSPIALLKSNILSAQSKLQLMLEPFLWRKRYASKISDEHAQESVGEFFERHFGKEFVDYLIDPFVAGTSGGDPQSLSMRHAFPEVWNIENKFGSLISGLIQSKLSPKKEKGGGGKPSSNEKTRIRGSFSFQGGMQTLVDTICNQFGKDELKLQCKVLSLSYSHKGIPSSENWVVSSVSKNSIEDQQYDAVIVTAPISNIKELKILKAGVPFSLDFIPEVSYLPLSVMITAFKKTSVTRPLEGFGVLIPSNEQHNGLKTLATLFSSMMFPDRAFSDMYLYTTFVGGSRNRELAKASTDELEQIVSSDLHQLLGTEGKPTFVNHFYWNNAFPLYGHNYDSVLRAIEKMERDLPGLFYAGNHKDGLSVGRTISSGYKAAELVISYLNST

SEQ ID NO: 41 - DNA, 37009 bp, synthetic construct
  misc_feature 1..37009: note = L397E+F420V mutated Beta vulgaris PPO2
  variation 32531: note = n is any nucleotide
  source 1..37009: mol_type = other DNA
tattccatcgaatgtagcaaattgactgtccgttgcaatttcggagtttccactcgtcgcatggtaaatggtaatgctatacgattctcacctctcaggagtctcaactcatcttcaactatcgcaggcatttcccaggaagaacccattaatggccaaagtgtctgagccgggtaaacccagtaagtcaaacattcgaatcacaactcaagcaaatttgtcttgtttgcgttatattttgctcatttcagccttttttgtttttccgacctttgcatactgaatattgtgtgtgtgtgtgtgtggggtttcagcttctgctaaaaggattgctgttgttggtgctggtgttaggtaaattttcgtctcttgcagagtttttgagtcatttgggaattctatgtgaaacttgtaactcccttcagtccaacgaacgcagtacaattttctatcaaatcatggtcctaatttccaattttccatatatattgttggaattatattgggattgtctatcactattaatagtattaggatcaattgtagagaagcacagaaatttttgggatcgaaagaatatctggattgccacattaacagcagatataattcttccaattggtttttggttcttcctaccttgacttgtctggtcaaacattataaactttaacctttaatatccattaaagtaaactataggatttttttgtctaaaacatgcttatataacatgaaatttgtgagaaaccaccttatatatatttttttgcgaaaacaaaccttaaacaaaattattatcgtgagaacaaaccttatgccaatttcgatcattgacccaaggttttggcattgaccgtgtcatgaattttgttgggtttaaaaagtcatgtgtcttgcatacgaaatggtaaatgcgggaaccttgggtcaatgtttggaatccgcataaggtttgttctcccaaaaaatgtttttgttcaaggtttgtttttgcaaaaaaacttatataaggtgctttctcagaaatttcatgttttataaagtagtatttgacaaaaaaccctaaaatatattatagaattattattgactaaattgtgtaaaaatgtactcttctaaaagtacattatagtattttagtggaacatttgcgagaaactactttataaatacgatttttgcgagaaatttcctaataaaaaaatgtgaagtgcaaaactatcttattgataattttctactccctcaaatccaaaatactatgaagtctttcctttctggtttgtcccagattagtttgtacgcttccatctttggtatgatcccacttttattatacttattagttttacgtgagttccttactctatctcttttaacaaaaatactcaactatctctatccaataaaaagttccttactagtcctatcacatctgctttttaataaaataacgtttgataaccacacaacttatatccttaaaatacacgttcaaccaagtgttgagattaatttggacggagggaataaatattttttgaggcatattggtagcagtattcggattccgataggttgactatgtttccaatgttgaccaacacttgccttgcatgtaattctaactttgctcttttttattcttcatttccctcgtattccatatacaatgtttagagacccattccttcctcttctcttctttcccttccttactatgctttgccataatcttcctcaaatgagtgcaaattaatttgtcgttgatgtaggccaactgattgtagcacatcttcatagttcatacctcaacacactcgtaattatattataccctacatgttaaatggctcatgaagctttattttatatcatacttcctccgtttcacaataagtgtaacacttttcttatttggaataatcacaataagtgaaaccaagctccaaatggtaagaaaagttcactcttattacaaatataccaccaaaaagtaagaggggatcacaacttcaatacttcttcactctactttattgtggtcccaactttctctctctaaattccttggtaactccccactttctctatgtttcacttatggtgaaatggaggaagtattttgtagtggtatttagctactaggccttggatgatatacaatcatacaatgtatttatattcacgataatttgctgcccaccttgattaccatgatttccaccaattttatcaatttcagtacttcaccaccccgaatttatattttttatttccaaccttggtatctccatttgtctgagtgcccgatccatttgtatcgcctccagaattgaagaagcttcctgcagctagacaattaggaaggttaaaaaagtttggagatggtggaggatagccataataatcattgttgggaggtggaacttggaaggttattgtagggttgaagtccttgatgaagaagaattgagttcaaatgagaggaaaaaggagcagggaagagggacaataagaaaaaaaagggtaaactaaaatcacgtgtaaggcatgtgcagatcaacatcagaaagcatagtcaacctactggtattagggcactgatacctttttgggtcaaaatttttttacaaggtatttcatgaggtagttttgtccatttttttttttacaaggtatcgtctcattttttttttatcatttagtttctcgcaataagtgtatttcatgaggtagttttttccaaaatttcctcatttattataaaatacctcatcttttccataaataatgcaatgtctagacttttacgctgtttacacatgctcctttgaccatctattgacacacaaggaaaaatagagtagagtcatgcaggatcttgttagatttttctcgatatatactttcaaaagatcaatttttttataattttttttttgaggggattttttttttataattatgtacttatcaaaggtcaaagttgtgcaccgggaagcataaaactctatgtgttgcaatttacatggaaggggaggagtataataagagaaaattatggtaaaaggttcattcctggagatcatgagaaaggaagtagaaagaacaaaaaagaacaatgggagtgcttttcaatgtttgttgtacgtagcatttattcatttgctataatgttttgtgacattgtagtggacttgctgccgcatataagctaaagtcccatggcttgagtgtgacattgtttgaagctgatactagagctggaggaaaactcaaaactgttgcaaaggatggtttgatttgggatgagggggcaaatactatggtaatgtttttgattattgcaggtcttgcactttagcgcacaattaatttctggatttttttttgtactgtggtggttatggtcatcaacatgtctcacccactgtgcttgcagatagagagtgaagcggaggtcacgagtttactcgatgatcttgggcttcgtgagaagcagcagtttgtaagtctttcattatctgaatggcacatactttatttcgaaagattgtaattgccttttctttctagatggcttcatcttcatgttgctttctgattcagtttcgtggctaactttccaagtttgtctgattgctaactctgtcatagccaattgcacaaaacaaaagatacattgcgagagacggtcgtcctgtgctggtaagtttgcttgttttacttttgacctcttttaagatctttcaactctggagcctggaaacatggtgatgcaggaggcaagttctctctattttacatcctttcttctctgtatcttatgacatttgcctcttattctgtgcagataccttcgagtcccattgcacttctcaagagcaatatcctttcagcgcaatctaaggtcgttttatgttaagacatacttgatgctgagagtttattgaattcttaaccttcttcttattttttttttatttttttagcaaaaggtaagtatattgcatttaccaaaaaacagtatgtacaccaccacagcagccatgtcagaatctagaaataccaccgaaaaaatcctacacccaaccagagacagttatattatatcctactcctaagtttctgtacccaatttacatcaatattggtccatttacaagatatttttataattcacagaagcacatcagttttaattagtttaataatgacctctggatgaataaccaactcagaccatatagccttattcctggctttccggaagttgtacgccagagcagcaagcacagcaatgcaaacctgtttcttatacctccttttatgtgtcttagcccatctcttatagctagtgaagatacagtcgtgtgcacaggattgaaccccaatccaactagcgaaagcctcacaacattatgactataaatacatctgaagtataaatgctgcacctttttctcctcttgcctgcacggtatcagaacaaatcccagctttagctaacaattccctggttttcagtttattcaatgccatcatgcaagcaatgaaagaatgttttggaacattcagtttgttccaaacacagtgagagcaagggacctttcctgcagttccacttagccacttatatccctgactaatagtatgactctttgcaccgtaaattgatttcaacttaactttttcataagcagtgaattgtgtgttgttagagtgtctagctgtctaggagattgggagaaaaggagggaccaaggagatagaaacacacctttgtgtttctttgtgtatttactttttagggtgggtcacgttttctgagaaatttgggaaaaggaagaaatagtaacacactttcccatttgtataacctgtatactggagctccaatataatttgcatttttttttgagctgcaagaatatgttgacaaacagttattgcttcttcctcagctacaacttatgttggagccattcctttggagaaaacgctatgcttctaagatttctgatgagcatgctcaggaaaggtaatgtcaagacatgtgttacctcgccttaattttcgttccaggaggtgagcatgcatttagaactaaaaggcacaaagactgttggtggtcttgcctgttcaaatataatggagaggagttttcgctacatttaccctctcttgaagtggggttgaaatatagcatcaagttgaatgcttgattaagtttaaaggacttgtgtaactctttttctgtttactgtgattacatgacctggttgattaacataatggtctgtttatctgtagtgtgggtgagttttttgagcgacattttgggaaagaggtaatggtttaccatagtatttctgctttagtggtaaattgtaatgttgctgataattatacttcgctgcagtttgttgattatctaattgatccttttgtcgcgggtacaagtggaggagatcctcagtctctttctgtaagtgaacattttgtgcttcactcccaattttttggaggctggaaatagattcttttccagttgttctgtcaaaaatagatgtagctttattttgaatttgaagttcccaattgttcattttgactattactgattattgctaagagtggcattatgctattatgctcctaaaagaaaggtgaattttgacctacatatagtataatgtatcaatattggtttaattgtttgttcttttgttccttttggtgctcatcttgcgccttgttctcatcgctcgttttttcatgttgcacttgatttaaatttgctcagcttaacttgtctttttgaatttatattacttattgctatattttactaatttcgttgaaactaattttttgctgaacttttcgttttgttgaaatcatttttctgaattaacttgattttcctgaatagaattgaattttggtgatcttaccttttctgcagccttttatttctttcttgtcctttttccaatctcatttttttatatttccattgtgttgacatcttatcattaactgtgcagatgcgtcatgcatttccagaagtatggaatattgagaacaagtatggaccataagacgtttattttaatcgacatgtatgtttcttagtttatacatatattaattctgtggtaaaaaaaccgaacaagaatatctttttttttttctatcatcaaaaagggtgaatatatgtagaggaaaaagatttgaatcaagatattagcctaaagcaataataatgttagtaatagctttaataacaaattcaaaacgtacattaatgaaccgagaggccggaaaatagttaaagtgaccactaagagaagcgaaggattcatgatgggttttcaacccagtagggcaaatttgttcaatgttctttacaaatcaagcttattaccttgtgggtgtttttgctagagatgaatgatagaattttccctagttggaagtcttttttggttactttatgggagctagtgatgtaatttgtttcgccttatggcatttcctaacatgtgcttttgtgatgtattgaagctttttttttgccttaatttatgctggattttaattttgttctttgtttcatttttcttgcttttgaaaaaaatatatagatatgtatatattaggattggtcgaggattttgagggaagggaaagacctaagaaaacttggatgagggtgattgatagtgatatgagtctatttgggatcgaagaaaatattcctttggataaggtgtagtggagggttgagggagcaaatttatgcagattagcttgacttaaagtttttctttttgattatttttcatttacttgtgttttgcaaacatttactcatgaatgatgtaaacttcttcaaccaaatctctggaaaaaaataatctacatggaaaaaacattattaatgttaacttgacagagatcccatccttgtgaagcagctagcaattaggcatctaacaattgacattttaatggacaggatagaatgtctcttgatagtcaataccctctgtttcattgtatcccatagctactaatctagtttgtatctttccaaagaaccattattttgaagtttcaccttgaacacccattttgaaccaatatgtttcttgcccttggggagaggggctaattgccatgttttgatgcggatgcaaagacacttgttctacctgagcctattgacttgatcatggatactctagggtttgaactcaagggaaagaatcaagtcttggcatgtgtggtgacatggcgtggggatggagtaaagaagagtcatagttctgttaggatatgttcttgcttgctacatagaatcgtagttctgttaggattgctatgatattatatctagtagatagattttatagttaattaggataaacatgtgatgatcatgttataataggcatgtgattagaggataggattagcttaattcttatcttgttgttagtttaattcttatcctagttttatgtttatcttagtcgaagttgtagccatataaagggcgttccattcattaataatacttagttttgctttgtgttttaaacatacttcttgattattgtttgcttgtgagctaactaatcaaaccattaaagacttttcaggagttttagtgctaaacatcttaatttcaggagtgattttaagagcgtttagtgatcttgaatcaagaaatatccttgttcttgttcgactaatatcagtggttttgttcgagttcttggagttaatctcttcaagattcttattcaacttgattgttgagcttattggtttagtaatcatatcaagtggtatcagttttccagggaggagaggatagataggattctctttgatcaacaaagatccaagggctatcaacaaggttcaaacattgctgcttgttcaagacttgatctttttctaccaagatgcattctttacgtcacaaggtagtaataacaagattaagagtggtttttacatccaagaatcaatctttcacgtccaagatttcatctttcacgtctaagattcattctttaagatcaagaaagttataacaagcatagaagaacacataaccatggagtccgagatggacaagcttgccaaagctatgcaagcacttgcaaagtcgcaaactgaatcacagagtcgactcaatgagaatactaccacaatcaatgggattggtagtaacatgaataggttggaggcacgcatggatgccattgcaaccatcatacaaaagaagcttgatcggaatagtgccaacttcataggtgccaattcagaggaagagttggcagaacgtgaagaaagatcatccaagactacatacaatgatgatcgtggcttaaagttggatgactataatggagatagcaatcgagaagacttgttacagtggattcgacaacttgagaaggtatgtgattatagaggctttgatgacaagaaaagattcaggattgcctccataagactcacgaaatatgctggaatttggcttgaaagcttcaaggcacaacgagccaagaaaggtaaagaaaagttgtgtagttggacaaagttgaaagttcaagcttaaagagaagttcttgcctagtgactatgaacaaaaatagttcataagactctctactataagccaagacacgcttagtgtacatgagtacaccatggaatttgacaagctagggcttatatttgacatagaggagaaagaacaatggaagattgcaagatacatcaaaggcttgaaccgccacattgccaagaaggtggaagtatccacttatcacacctttgaggatgtgacaaagttggctaagaagtttgaagaacatgagaaggaagagaagcctaagagttcttacacgcctaagtatgatactaatgctaaggccaaggctagcttcctactcaaagtggtatgaaggacctaagaggctaagaacctcaccccacctaaagaagacacaagagttgagaagcctaaagtcgtcgttccaaaggagaaatttgaagagatgagaaagtgcttcaagtgtcaaggaaggagacacatagcaagcaattgtcctaacaaaagagtcctcaccatgagacaatacctagctttgcaagaagaggaggatgtctattagttcgtccctgatgaagagcaaacttaggggaagaagaggaggaggatgcttttgctgaggatgatgcaaggctagtaggggtcaagaggcgcaccttacatgtcgaccatacacctagcatggagcaaatggaaaaatcttttccacactagatgcaaggtaggtgactatatatgtaatggtataatagatagtggttcttgcactaatgttattgtatctgaggtagtgtcaaagctaaacttagctacaagggcacaccctaagccatacaagttgagtttgctagatgatagcactggcatgagagtaaagaaacaagctttgatttcattctctataggggttataaggatgagttatggggtgatgtattgcctatgagtgcatgtcatctcttgcttggaagaccattgcagtttgataaaaaggtcatccatgagggggactctaatgtgtactctgtgttggttggttctaagagggtatgtttgcatcccttagctcctcattcagtggcgccaaagcaaccacctaagacaccaagttactttctatcttcaagggagttcgaacaagaggtggaggaagaaggttgtgcttatgccttgattgtaagacatgctgccacaagtgtcaagactactagcaatgagaagctcgaagccttgatgaaagagtttgaggatgtctttctagaggaactacgacccttgagaggcatagaacatgctgtagaccttgtacctggcgcccctttgcctaacaagcctgcttataagtgtgatccagtggcatctagggaattgcaacgccaaattgaggacctaattgaaaagggctatttaagggagatcatgagtccatgtgttgtgccagctttactagttcctaagaaagatgacacatggaggatgtgcatagatagtagagcagtgaacaacattacagtcaagtaaaggtttcctatgcctagattggaagatatgttggataagttacatggggcatcaatcttttctaagattgatcttcgaagtggctaccaccaaatgaggatcagagaaggtgatgagtggaaaacaacattcaagaccaagcagggattgtatgagtggatggtgatgccatttgccttatgcaatgcgccaagctctttcatgagcttgatgaatgaggtacttcgtccgttccttaacaagtttgtggttgtttacatagatgatatacatatctatagccaaaatgtggaggaacacttgttgaacttgcgtagcttattcatgaagcttagagagcaccaactctatggtaagattgatggcgacgaggttgacgggggattatggcggcagtgaatcaccctctttgccggtcactgaaatacaacctgaggtatctttaaattctgtaattggattgactaacccaaaaactatgaaattgctgggaaaaattgctggatgtgaagttgtggtgatgattgaccctggggcaacccataattttttatcactagctactgttgagaaattagctattcctgtgtcggaatcggaaggatttggggtttctctaggggatggacaggcggtgaggggtagtggaatttgtagaggggtgttattgagtttaaatggtggagttgaagtggaaacagattttcagcctctgggtcttggtaattcggacgtgattttgggtgtacagtggctggagacgttggggacagtggagagcaattggaaaacacaaacaatggggtttgaaatcgagggtgtcaagttcactttgaaggtgacccatcactggcgaggtctcgaatctcactcaaagccatgatacgtaccttatgtaaagagggtggaggtttgtggcttgagttgaaccagattgagcattatcaggagaaaacaccgcattcatcagccttacctgaaattccagttttcttacagagagtccttacccaatttcagtctgtgtttgctacaccagaaggcttaccaccgataagagaacatgaacatgcaatagttcttagagaagggtgtaatccggtaggggtaataccgtaccgttatccacagttccaaaaagatgagatagagcgcctcatcaaagaaatgttggcttccggaatcatcaatccttccacgagccctttctcgagcccggtgatattagtgaagaagaaagatgggtcgtggcggttttgtgtagactatcgggccctcaataaagaaacggtccccgataagtatcccattcccgtgattgatgaattgttggatgagcttcatggggcaacacttttttcaaaactcgacttaagggccgggtatcaccagatccgggttaaggccgaagacactctcaaaacagcttttcgcactcatgaggggcattacgagtttttagtaatgccatttgggttgacaaacgcgccggcaacgtttcaatcccttatgaacgaggtcttcaaaccattcttgcgcaagtttgtcttggtatttttcgacgatatattggtctacagtagttctgccaggaacatgaggagcatttgaccttggtgttgcacaccctagcagctcataaattgtttgtgaatcagaagaaatgtgattttggcaggtcggaagtagcatatatggggcatatcatctctggtcaaggggtggctgtggatatggagaaggttcaagcgatggtggaatggccccttcctaaaaacctccgggaattacggggatttttgggccttacagggtactaccgcaaattcgtacttcactatgctcatatagccaagcctttaactgatcaactcaagagagatgcgtttgggtggtctgaggcagcaactcaagcctttgaaaagctcaagaaggcgatgatcacatcccctgttttggcaatgccggacttccaagagttgtttgtggttgagaccgacgcatccgggtatggtctgggggcagtgttaatgcaaaacaaccgacccattgccttttacagtaagttgttaggtgcccgggctcaattaaagtcgatctacgaaatggagttgatggccatctgcatggcagttcagaattggagatattatctgctgggtcgacatttcctcattcgtacagaccaacagagtttacgtcatctcactcagcagcgagaagtaagtactgccttccaacgttggatgagtaaacttatggggttcgattttgaaatacagtttaagccggggtgtgccaaccgggtagctgatgcattatcccgcaagacagtgggagaggttgaattgggtgcgctgatattaactcatggggtggactggaccgacttggagcgtgaaattgaaggcgatcctctgttgtgcaaaattaaacaagacttccacgggggtgctattactcctgtgcacttttctttggtggacaacaagctgttgttcaagggtcgatacgtgattcccagctcttcggtttttattcctaccttgctgcgagaatatcacgattctcccattggagggcattcgggggacctcaaaacatatctcaggatggctgccgactggtattggaggggcatgcgcaaggatgtggcgcggtatgtgcaacattgtagcgtgtgtcaacaacaaaaaatgtctcaacagatgccagggggggtactacaaccactccccataccttcctcggtttgggatgacttgtcaatggacttcgtggaaggcttgccatcttccaagggggtaaacaccatcctcgtggtggtcgatcgtttgtctaagtacgcccacttcctcccactacgtcatccatttactgctgtgtcggtggcaaatgtgtttgtcaaagaggtggttcgtttgcatgggtttccttcctccattgtttcagatcgggatcgaatttttatgagtgtgttttggcgggaattatttcgtttacatgacaccacactcaaacgaagtaccgcgtatcatcctcaaacggatggtcagtccgaaatcgtcaatcgagctctggagacttatttgcgttgctttgtgggggaatacccgcgctcttgggctcagtggcttgggccgaattttcatataatacttctcctcatctctctaccaaaatgaccccgtcaaggtcctttatggtagagaccctcctactgtgatacgggttaatcggggagcctcacctgttgaaagcttggaaaacatgctccaagagcgagacgcagtattagatgccttgcagattaatctgattaaagctcaacagaaaatgaagagtagtgctgatgctacaagaagagaggtgcattttaaggtgggagatcgagtgtacttaaaattacagccttaccgtcagaaatctttggcttaacgcccttatgagaagttagccgcccgtttctacggaccatttactattttacagaagattgggcaagctgcatacaagttacaacttcctgtttctagcaaggtgcatccggtgtttcatgtctcccaactgaaacaggccgttggttccattcccgtttcagccactattccagagcaattgtcttctgacttggagttagaggtggaacctgatgaactcctcgatgttcgtagtgtttctagaggccagcacacttacttggaagctctcattcagtggcagggattaccatcattcgaagctacctgggaagatgtggctgctttccatcaccattttccatccttccaccttgaggacaaggtgaaactttgggggggtggtaatgtgatgcaccaaactaccactccactactcacctattagaggcgtaagaaaaagggggtaaatcaggaatagtttacaaattctgttgaaaggaatattttgtaattatgatgtcagaggttgttagcaaaaaggcagtagagtaacaataaaaaggggaagggaggagagaagaaggtattgagatttttgtaaggaacttggcccttgggagagttgggagcctctcgaaagctcaccattatcttgtgaatattttccttcctggttatatacaagaaccttcctctgtcaatttcttttctctctaatcttatttcttattctgttttctggttgccattgtttgaagttgcttgttgtgcttgagtaaatacgtgaagtggtgaaacccatctgaattcatcacatctattccaagtggtataatacaagcttgtaatccaaatctaatgagaaatctaagttatgaagaatttcaaaagaactaagtacccttgttttggatgcccaaggatttacttgccgctcaagttaatgctcaacgtgcaagatacaacctctttagtatcccaaggtagtttccataagaattaattgagctcaaatcaagaacaatatttttatgtattaatgtgaacacttcctgaattatattagatatatggtctgaaggttggaagaaagattagcttttaattttaagtttgagatagtttttagaatcgaggaaagattagctcttaacttgtaaactaaggattgctttataagtaaaacattagttatggaactcttaaaattggttttgaacatttctagttaaaaatcccatgtaattctcccaaactagcttaaaatctcacatttcacaagctaaggagagacaaatggcgttctcttgtgaaacaatctaaaattttcattaggctactgttttcaagtatttatatgttagaagtgccgcatataggtacataaaataagtttacaaacacaagtaggaataaggaaaactaaaagagaaacttcagccatacaaaaccggctgaaatcagctactactttctactttctagcttcaaaatctgattgcaagtctcctttaagccaatcaccaatgaaaacctttcctccacatgaagtgtgctcaaatcaagagaagaaacccatcattcgcctatagctacctgggtcagatgaagatacggcaaaaaaaacgctggaaatcagtgaaccaaaataagcaccaattggatgctttctgtccttgctacattttcttctcataggactacttcaagccatacatgaataagcagttagatccagctcctagcatccatttgatcgtacaaatgagctccaaaaagataagtaaaaccaagcagccaaaacctaattaatactaatgatgaattagttgaatagctaatgacgatgaagcaacactttagtaggaatagtgttaattatgatcaatgctacttaatcttctgattaatttttggaaaaatgtcatatctaccttctgtatacacttattcataactatatcgtattattattatttttaaataactaccttttaagtaccaaaacctaagaaatcaggcacttgatggattccatccaaagatccatttggcggggcccactaactgacttttgattttttgcctttcctcttttggttaatctcaatggttcatcaataacaactcaatcttctccccatttcatcaaatcatccctaaatcagaactttttcaaattcacccaaatgaggttatggaaacctctaccaagtttattcgaccacttttagtctagctcaaagttttacacttgcttcaaaaactaagatttattaactttagaaattaggtttttatttttattttttatttaactttgtaacaatcttaaataactcaggtgctttctagagtttggctttaattgtttttcccttggttatgtgaaagaagtatgactactttctccaagactaaagtagagagcaaaaaatgcaattctggaatttcttgcaaaagaaaaggaacgagttaatgataatgaaaaacaaagaaaatgatgagaagagaggagctgaatcaatcatgatcatgtattttaaagttttttttgctattgaagtgacttaagaagaggaaagaggatgagtgaagacaaacaaaagaaaggataaatagagggaaatcttgggcttagaaaggtgaaaaggtaagaagatgagttagtgggccccaacaaatgtatctttggatataatccgtcatgccactgtttggggcttgcttaagtccatacattacttcactaattttacaaaatttattttcttgaccaagaactgaaaaaaccttcagtggtgatctattaggttttggaagttaaaaggtagttatttaaatgtttttaatataaaaggtagttatttagatatttttaatataaaaggtagttatgtgaataaaagtgtatataaaatgtaattttttgacatttttgccttagtttttcttgctaattcaccttttcaacttgaccaagttgctatgaggagaaaacgagcaattattaagcaaatcgcaacactagcattaatccatggcccatgaaactctccataattagagattggattagcacttagtagaacttcttgctcctgctccaggtttccattacttctttatctaagtgcatcaaaaggttgttgggttatgaaaggtggtggttgtgtatagtcattgtcaaaatgttgttaatgcactctatttagaggatgagggattgaatagttttcacctcgtgacctttcattcctttttaaaaaaattgataatgtgtattggtcctatgactgtatgaatggtaataagctatctcatgagctgttactatcttcctcagagtctaggtagaagggtttgggctgataattttctactatgtgcaattagtttgttggatttggatatgctagttgatataggtcctttcccttgggccttctcttaatataggcctacagtgtgattgaagataaatcttctggagaatataagaacaatgagatggattggttagaggttgatttgttcttttggtgtaagactatttcgggttctctattggttatgttcagacgccagaatatgtgttggtgattgttttccatgaacatactttatccgcagagacatttttcttttttcttcctataagattatatttgtttcctctcttggtgctcatctcagtgtctctactttacgttaaactgttgacattacttgacaatgcgtatatttgtcgcatggtgctcttccctcactccacgtcgaccccatacatcaaaaaatgccattaaagaatattcgaactcacaaccttgtgttgaaagaatggaatccctaccaatgactcattaattcattttctctttaagaaataaatgatttcctcacaaacttttaggctttaagagcccaaaagataaaaacataaaataagatagacatcaacgtcaagattagccttaaatgcacaaagcacatgtcaaatgattgataactactcacgagttgcaactctttgggcgttgcctaatattaattggatctcttttaaaaattgttggtggttatggttggtggagaggaccatgtaacttttagctggtcacaactggtaatgattgtcacttttactgcccataaaaaaatttaaactgttgaatatgtttctggcagtggatctgacaaatcctttacaagttggcgtccattttgttttgccatgtgactcaattataatacgtgagttttattatccaccaggtttggctcactaatttccggattaattcaatctaaactgtctccaaagaaggaaaagggtggaggaggaaagccttcttctaatgaaaagacacgcatacgtggttcgttttctttccagggtggaatgcaggtattagcatgtagctttcattctgttaacatttgtggttcttccagacatacatccaatgctttttttttttcttgctataaccataaacattcttgtcatgaacattctttaatactgttgctgagcttagtgtattcgttcattcatgtaatttcctctcttgaggttaaaatggcatacagccttacaacctatatccataatgctccttagagtagaatccctaggttataacatagtaccacttatcaaaataaacatggcacacactgcaggacaagaagtaaatccacctagagaactgagcacctagtagtaaaagcagcgatacattactaataacagtagcagggccataagagtagtaaatgggcctcatttcaacactccccccgtaatggtgagagagaagaagcagtctgaactcccagcttggagagcaaaatagagtgttgctgaacagggagaaccttagtgaaaacatctggcacttgatcttgagatggaacataggtaggctgaataaccccttcttcatttgtattgtccctcaggaaatgacaatctatgtctacatgcttggttttctcatgatgaactagatatgctgctatggcaagagcagcttggttatcacagtagataggagtagcactggactttttaatgcgaagatctttgaggagttgtttgatccacatcacctcacacacagcaagagccatggatctgtactctgcactgaccacaagaaattgcctctttgactttcaagatacggggggagtcaccaaggagcacacaaaaccagatgtagaatttacaacacccatcccattcactatcacaaaatgctgttagttgagcactagacttgttcgccatgagaattcaccctgttggcagcttgaagatgcacattagtggggcagtgcataaatttgcttaaatcatgtatagtgaaggcaatatcaggcattgccttgtaatagtgagataaatgagcttccccatcaatttttgatacacatcaggttgttgaagaggatcaccattgtcagcatagagcttgacatgtgagtccatacgaagcctcaatcgtctgcaatttataaaaccatattcatcaacaagacccatcacatacttctttagagataaaaacgatacttcactacactgatccacttcaatcctcaaaaaatatcttaggccacccatatctttcatgtgaaattggccagcgaagaaactctttgcttcctcaatagttgctaaactattgccagcaagaatgaggtcgtccacatacaccaatatagcactgaaacagtgagagttttgcttgaagaatagagagtagtcacacttggattaagtgaatacattttgctttaaagcagtgttagcttggcaaaccattgcctcaaagcctacttcaagccataaagtgacttaagcagcttgcacaccttagttcatttggtgtcacttctgccatcagtacttagctccccctctccttgaactttgatcctgttacatgtttcactatatcctggtgatagcttcatgtatacactatcctacaattcaccatgcaaaaaagcatttttaacatccatttgtttgcaagaaccaaccctctaaggatgcaacaacaagcatgtggtcatctttgctacaggggtaaaagtctgctcataatctattccatatctctgtctgtcacccatgattacaagccttggcttatgcctattatttgtgccatcagtgctgtattttgttctgatccatccatgtgagggatggctcatttctacaaaatcctagttccgttaggatttgtgttgttttcctaattctagtaggaataggactcctaaaatcctaatcctcctagttctgttaggagtttaaaagttttagtttgattgtaattctagttgtgttagaaatccaaatcctagattcatgtcacgtatggttagaacatggctagtaggataatttgtcttgtgatgtccatagccttggcatttgtggcacctaactttcaatagcttgtcttctgtctccttttctttctccttctttgaggaatcaacgtttttagagctatctaaaccactagcatcaatattaggtttaaaagtgctaaaagatttcgaatagttcttacttgcatacaatttctttttctagtttatgtagcgtcaccagggaacaaaaactcggccgttccgttctggaacggccgctttgtaacggatttcagagaggccgttccgttaaataccgttctagaacggtgatttggaattcacaccaaactcggcgcgatagcgttacgtaacggtgtaacggcgttccagaaccgttacaatcacataacgtccgttatttgaagaagaccagttcttttggtggaggaagaagaagagccaacgcaagatctatagatctgagttaaaatttgaaaataaaacatgtttttttatttaaattaaagcttacagaggatgtagaactcaaattcgagtaaacccctcctttaatttcattaggttactgcaaatcgaaccctaaattgcaaaccctaatttcgaaaaaaccctaatatgcattgggatgcaacgctgcttctccggtcatggcagagaaggtcgacgagtcatcttcggctgcttttagcactgtagctgccggtggttggcttgtttgcaggttagtgcttgctggttttctttctctcataccgatcatcttcttcttttctctcttctctttttcttttttattgtgtgactgccagtcacgtgataattgcaactcataaagtatctctttctctctcttcttttcatccctttttatttttctttcccttttagtttttattccctcacgtggaatcacctaattttcatccttttttatttttttagttacactcttacacagaagtatgttcaaatatcattatagtacctcaaatattgtatttataagagttttggacataatatgatatagaaagtaaaatagaagaaaaataaagtttaaatgtcacttgtgtgatttttttaaaaaaattcacgccgcgacggccgcgaaacgttctatttcccgttacaagccgttcccgcgataacgcgaccgttcccgcgaacgcgaccgcgaccgcgttttttttccttgagcgtcacatcttgcaagcttcttcaaaggtgagttatgtgtacaactccaatttctctccaatcccctccgtcctcatttaggcctccaaggaagctacttaaacattgatcttcaagttcatcaattttccaaagaatggataacttctcgaactcctttatgtaatcttcaacggacatattcccttgtttaagagtagaccattccatgtacaagctttgtttgtagttagaaggaacaaaacgtcctcttaacaactttttaagcttatcccaagtagagattttgggtttattagctttcacacgctgcctctttactccatccaaccaaatagatgcatatttggttaccttaagcacggccaccttgtatttcttttcttttggtgtctcttaatcccaagtagagcttttgcgtgtgaaagctaataaacacaaaatctctacttgggataatcttcttcttgtttccgaaacaactaattcttatggtagttaggaaagcaagaatggtttctaattcaatagggaatatattaattattattagtttaagttaaatagtgcacgaatctaaatagattattcgtctcaaaatctcacttaagtatagatttgtttggacatctgagggaagaagaagagagcgagataaaggagaattatcactcaatgaatccatatcccgagttttcccatttacttctttgaaagcaatatagttcacgaggtcttattatcagtctatggacataagagtaataatttaagggcaaaaactatgactttatgggtttaaactgatacatgttctgttaaactgatagatgttctgtgttaaaccgatactcatatattcctggttaaactgatagatatatgatttaaattgatacccgtctcagtcatgtcttggattgagacggtctgacacaagactttttgtgtattatatatctgattagaataaatttatcctgtttactaattattttatcttctccagacacttgttgacacaatatgcaatcagtttggtaaagatgaactcaaactacagtgcaaggtcctttcattgtcctacagtcataaggggatcccttcttcagaaaattgggtcgtgtcttctgtgtcaaaaaattccattgaagatcaacaatatgatgctgtcatcgttaccgtgagttttactttgcttactgctattgcaccaatctttcttcttttgacacactgataatggcaatgctgttgtggtttgaagccatgttatggggttttagggatatttatggagtctgatctaatatgttattggataaaattcagatctgtaacgtgactcaatgagattgaaaaaaattgaatcaagataatggattggaaaattaggagctaacctagggtctataagcgatccacttggagtctcataccaagcaggtattcgacattttaggtttatattgctgctatggctcatatgggagcctacatagggtctggtgcttattcctttttcttttgtctagttttggggctgcacatttctgttgtgttttgatatggatagccatcacctgcaattgcatggaggctgaactaagttctataggggagcaaacagtatctgttggaaatttattttcatattgtgtttttaaatgctataatccaaaatttgttgttcccctaaaatgcctaaaatacccttatgtaactgctccatctgtcccttaatagacttcccatttctccaatgcatgtttgccaatacacattttgtattgttaatatcaaaaattacatattagtaaaaattataaaagtttgattttcctaatgtacgcaatgagacgaatcaaacaagacgccatatgactatgttttttcttatacttcctatgttttttaataagtgacatgttttccttttagggaaatgtcacaataagtgacacatagctcaaagtagtaaaaatacttctcatttattacatctttgccattatttaattgtttcacctacctactttatccaatactcaaatttgattggttgaacaattggtcccaactttctctagactccttggtattccctttcccccactttctctctgtgtcacttattaaaaaatggaggacgtatattggaaaaaaattggaaggttttcttcacttatgaatagtggtaaaattagagatgggaaggctattttgggatggatggagtaatatttaaatttttaaaataatgtcattgttttagtgatgaaataaaattcaaggctattttttctagtaattatgttatctgtacatcaccacacgtatcgcgtgcatataagactagtttgatgatattccaacactgttcgaaggaagtcaggcatggaaccatgtttgcttccatatgggaaatattttgcttactctccttcaaacatctacctcattatcccagaatgattgatcgaatctaatacaaatatacaattgatcatatgccaccagggaattacatcaaattaaatttttatagaaggggaatcagtcatagcctcatagggaacgaataagtgatactcgccagtttctttcctggttacttttcctcttctcactagccatcctttatgtatgggtatgctgcatcattcctgccactggttgggactcccgtttgaactatggggggatgggaaagctaagccatcatcttcaaattgagtttcttgagaatgtaagacaccatctgtaagatgaatatagtgcactctatagtcaatgtcatgatctttatgggtttatctgctgaaataactgtgatatacccagctctccatttacaaagttttcctacatattaaactcttgcccgcaattctagaacttcattgtagaacttttcctacataagcatcatttgtcttttctgtagtaaaagttagaaagagctttattttagaacattcgtttttagttttctttgttgttgattactccgccacttttaatacttttatgattcaagtatttgacaaaatcatgtaatttaggtcctctgctgcatgcagtctataccctctctctctctctctctctctctctctctgtggttgtgtcttacttgttgagttactaactccagccattacataaagtaggctggcattatgatgagcaaattactcaagaccacatgttagctcctttttcttttctccttattctgaaaggcaaatataggtccatcttggtgcttctcatgtcataagtaagctgaccccctccttttccagggaataggacaataatccaaaagtgagggttttacatgttgggatttgtgaagtttcttattttacttaatagccgagtcagtgttacaatacatagtaccgtgttacaaaatagtatgtaacaccaagcatgtttatgtgcaaaattgtgcaagactttgttgctggcacgccaagggctgttttaatgtagtttacttattcttttaggtttttcagatgacaatcataaagggaattaggagtgtttttattgtagtcaatccctattgtgctacaacgataaaagaaaaaagcacaagactagaaggagaagtaatgtctaggaaagactcctcacctggggttgctagtcacctacacatcttagaaggcatcaaaccaaagcttattcccctcgactgttttcgggagaaaagaagacaaaattgtttctaacttatactttaccagtttcactacagcatcagaaagaagcaaaatatgctcccacaacacggcgaacctagctttccagatgtgataaaccagaccagcaaaatgattattttcactagagctttgagtctattttttcggtttttccccttcttcctggtaatgtcacgccaccaagccatcatctcaattttttgagatttgacgtaatcgctcaaatagctgagtaagacacttcttgctctaaatactaataaaaaagaggtgaatgtgggtctcagccatgttactcaaatcggataaagtgtctactcttattagggtttttgggtgttggactcatccatttttttttgtaaaatgtcaagattttggtttgaaatgagagattcaagtgtcgtgacatgagtcggcacgcaacacttaaacgtgtcgaagtaacagagggtctcagacaatcaactttaatcaatcacgaaccccaaaatttatgcaacctttgctcatattcagtctctgtaaagcactcaactgcagcacacccacccattcgcttcacctacagcaggagggcacccaagtaattgctatgatgagcgaattattctgttttgccttgctggaatattgctgttagatttgctgactcactggcagttaattatagtcagagaatgagaaatatcctgtagagagagaaagggtatcttttgtatttagctctataaatagctaaggaagggaagggcattgagagtttatgatattataataggagagatttagcctctcgaatgctgataggagcgtagctcttgttggattatcaatactactctgtttgctctatctatttctactcaggttccttcttgtacagtggatccctgattggatttacttcatcaaccagcagataaaattatttgtaggcacattgaaaccattccaaacctaatgaggccaaagtttatcacaaagaatataggagccaaatgtaggcaacagataagagtataattgccagaagttgaagactccaggtattgttcagaaaccttaatgcatatcatcattctgacactagattttccccggagccaactaacaaaaatgaattaaagagattaaggctatgtttagttcacctgaaattttctgatctgaacttatctgatctgatctgaacttattttttctgatctgatctgatctgatctgaaccaatctgattacaagatcttatcttttagatttttctcaatatataagaaaaaatatagtcatgtggggtcttgtttgattcgtctcaatgagtactttattaatattcaattattataatttttactaatatgtaatgaaagatataatgatttttaaatataagcatgatctgaactgatctgatgtgaacttattttttctgatctgatctgatctgattagatctgaaataagcaaaaataaggtgaactgaacatagcctaagcaacaattgagggaaaataagatcattatggctaagataagataaatatgtaatgataaaatcagagtaattatatcagttacactctcaacattcgtcagattgaggtttcctcccaaaatgccaacccacttttctgtattttcacgtccttctctctacccttctaggtatatattacatcagctgtaaaatttttgaaccaactagtagaatactgatctaccctcaactgcctcactttctcattttttctgggcctttttctctctagcacaagtccacataagtgatgcatagcagaaatataattccactagtcatcctcaatattgatataacaaacacatcacccacatattatcatttttaatcgctgcatgcgaggcatacttacccaccaatcaggatatgcataacagcgttcctaattccaaaaccaccatatatcttgggtttgcaactctcatccctagcaacaaggggactttctgaaaaagtggcagattccgcccacaagtagtttgtacggacacctttattatattattaatatcatatttcggcaacacaaattaccagcccagtaaaacatgaattgacatgagactaacaaggggcccaatctaatatcgtacgtctgtactaagcaatgtataaaaaaaagctcaaggtgcattgatgcaatagggatcctaatgtgcataggtgcgcctcattgaagtgaggcaccactaaggataaataaaaaagattgatgtaaaattaaattgtgcaccttgggtgcgcctcgatgaactttttttgtgtgcctaagtgtacctcaagtacgcctcattgatatcgcctcgcctggcagaaaacgagcttgaccccaatcgccttgctccccaccgcctaggcgtgcctcagtcacactttttaaatacattggtattaagtactcagaatggcaaaaagaaactttgggcattaattagacatttcactttttgtgcaactatttgtgacttcagagattgatatgttttctacattacagacttttgtgatggctgcatggtctccactgtcaaagaacattagtttaagtagaagaaatattgctctattaccttcctccctctacaaacaaaatcctaaaatgtggttatgtagtgccaattcaaacttgtagatgcatgactaatgctttcattatgctgtgggtttttatactatgattcatgtccaattacataacaattagctggagtcaggatatgtcacggaaattttaagcctggcaggatgattgtttatattttctctttttcggtgtttaagtcaaagtaaacttctaggctgctcttttataggctagttgggctgttggggagatctacacattaagtgtgaagaaatcttgtctaactccagtttggttgagaactgtaagctgtcataacatttgttgcatgatgaggccttgtgggattatcatgttagctgtaaactctaaacttacttgaaatctagtgttgtgtctccttatttctgtagtcaaaattgaaccttctgtacgtttttgatacctgcgactagaatgatggaattctgaattactgatactattacaaccatctgctaagaacgaagatgactcttagctaatttctcagcagatttagagaaattaagaagaattactaatgaatatttaaagagaaaactaccaagatatgattgtattgatgaaaaacaccaattacaacctaaccaacattcgagaggttggagctctcccaagtaaccatttctctcactaaacttatcaattttcaagatgccttttccattctcagttcctctatatttatactactccccttagcaaactacccaacttattccccaagtaaactaaagagataatatctaaaatacccttccccctacaataatattagttcttagcattaccggccccctaaacttccaccttgtcctcaaggtgggtcgtaatcatcactaaattctgggcctctactcgtatattcagtgtcttgcagcccttcaggccccaagcctaggttatgcagctcgtgttgcggctcctcctcatatagttctctggctggagtgagtgcctcaactataatgaaaaagtcctggaggtggggaaggaaggagtgtctgaaatggtgtggtgtgctgctggtgttatgggcttgtgcctgaaagttttgggtttaaagagatggagtggagaagagtggagaagtgactggagacgtaaaagaaggaatcataatttttgtaagtggtgggttgaaaaagttggtgggaagaattgtttttataaaatgtagtgtaatggtcgaaaaatgggtggagtaagtatggtttttggctggggatgtggtactgggttgaaaataaataggtctgagcttacttgtaaaattggcctcaacatgagcaggcccaatatcttgagccaattccccaaaagctggcaatagagcactcttaattgcattgttgtgggccatcgggctccaaacatatattcggaggagccggacttctttggtgatgtcattagcttggcccattgcacactttcccttaacagcctcaagatcttttcccacttttgtaccccaaccacgtggcttcaccatcctttctttcttgcttttgtcacttttttggcaatatacgagtttgtccttactaccctcatcttctaatgttggcttcctcaccaagcttaatttctggaattttgtccaccaaatcccaccacccatcgtcaacaccatacctatctacaccggccaagaagcctggtcctccacccgaattttcgccacagacaaagcctgaacaaccgtcagttctctcaccggagaagttcacaggtccaccacctgacccactagttgctgatccacccttcacaaatctccctcctctggctgccacaagtagtggttcctccgtaatactcatatttctcgtccaagagccctggaccaccaccggacccacttccaccggcaccaacttgttcaaatgatacttctctttcttttccaaacagcctacttggactggaaaaaccactgcgattgtagcctccgccagatctgtagcctagtgcacctaacgtgcttccaactgcaacccaatagggatggaaatggatgggattcggggagggtggagcatcacccgcatccgtcacccgcatccattcgctccacccgctccacccgcatccatccatccgtcacccacgggtgaaacgggtgggtcggtgataaacgggtggaaccatttagggggtgtttggtatcatgtttttttacaaaagaaacagaatcaagtaacaaaatccgtttctacttgtttggttctatgttgctcagactcgagtacccatgtccgacacgggtacgtgtccaagtgtccaactcagctattttctagaattttttatattttttaacccaaaacaaagtgtccaagtgtcccacccatgtccgactcccgaggatccgacacgggtacttgaggtgaaatgaagagtccgagcaacggaggtttggttagtgtgtaaagtaacaattaccgttacttgaggaaaacacatccccccaagttgtttccattcaaaaacctaaggaaacaaataacgtttcactcctcaaacaagaggaaagggaatgggttatatttatttccattccattaggataccaaacaactaataagggtaacacttattattatcctttcccctccttatcaaaatcctttccattccgtttacggtattcataccaaacacccccttagtatattttctaatgaaatttgtgatatgatatgcatgatataaaataattctatcaaaaatataaaaagtaagtaaacttacatgtacaacttaatagatgggtgatgggttggaggttaaacgagtgatggatcgggtgacgggtgaagaaattctcacccaccactcgctttccatccatttaaattaggtttttcatccatttaaaaaaccgggttaaacaggtgatgtatgatccatcacccatttccatcctcaaacacatcccgatttgtttactgcaccaccagatccaccagtataaccacccgaaaaatcatcatgccttctactagccttgtaacctgctcccggtgagaagcttcttccacaagtggtggtcgctggacctccatctccttcttccccaaaaaattttccatgacacccactcgacccttcatctgtgacaacctcttcttcgtccacctctgaagttttggggtcgtcttcctcctcaagctcctcttgaagtaactttaacttccgttggatgggagagaacgcttcattgattatcttcaccagatcttcttgaagtttctcgaaactttttctcacgttttcctctacctctttcgtgatttcctttccgatctccttcatttttagactaggagctcttgcgattccatggcagatttctttttttaaaacaagaaaatcaggcacttaatctcccagaatagtggtgctctgataccattttctaagaaccaagatgactcttagctaatttctcagcataacaacaaatttagagaaattaagaagaattactaatgaatatttaaagagaaaactactaagatatgattgtattgatgaaaaacaccgattacaacctaaccaagaggttggagctctcccaagtaaccatttctctcactaaacttatcaattttcaagatgccgtttactactccccttagcaaactacccaacttattccccaataaactaaagagataatatctaaaatacccttccccctacaatattagttcttagcaccatcaaactgggatggatggttttgtaaggttccaatttacttctccatcaaaatattttaggattttttatctcatgtattttagagtttcctcgtccctttttatctgataagattcttctgatgatttgattttatggtaggctccaatcagcaatattaaagaactgaagattctgaaagctggagttccattttcacttgacttcattccagaggtttgtatttttatagtggttagacatgcttcccctagttttcaaagtaaaagcatccttgttgtgacgatattttttcccttgtttttgtttttattattatcatcacttatttccattttctattttccatgctgataagatgttcatcaccataatcttgtggtatcagaagtgtttagtggagtttattcactacacatgcagttgttcttttgccatgaccgccattcattttctcgtcaaaacaaatctatgaagtttggttttcagactcatggttcttgtagctcttgtgaatttttttttcttctccttgcatgcattcttcaaattacatattgcatataccaggtgctctcctttattttatatttaatttttaaaattctatcatatattttttaatgtcaaacctcaaactaggggttcactgcatcttaggcttaccaggctaatatttctttacttaaccttttccctttatatttgctatcctcttgtgtagtaatcaccataagaagggtacaaactaaattaccctcccattcttttgtatcattctgaaatagtgtcacagagctttgatttttttgccctcatttaatctggcaaatgttctctctatttttttttttttactttcttttgacgggattctcaggcaattgttacggggagcagccagtcacactgtttctgtttattatgcaggtgagttacctgcccctctctgttatgattactgcgtttaagaagaccagcgttacaagacctcttgagggcttcggagttcttatcccttcgaatgagcaacataatggactgaagactgarggtaattgtctggttcacgtgtgtagcgaatcagattttcaaaccctgatttcgtaacattgcaggtactctgttttcatctatgatgtttccagatcgtgctttctccgatatgtatctctatactaccgtngttggaggaagcagaaatagagaacttgcaaaagcttcaacgtatgagatatgcaatgttttaaatgtatgctatagtcatcgtttcaaccttttggtgcctttttcttactaatttatcctcctggtttaatgatcttagggatgaattggagcaaatagtttcgtctgatctccaccagctgttgggcactgagggaaaacctacttttgtgaagtattgatatctttcacccaacttaacatgatttgtgcttataatatgttaaataaagtaactgaaatcctgaaattaagactacgaaactgtatggtgacagtcatttttactggaacaatgcattccctttatatgggcacaattacgactcagttctgagagcaatagaaaagatggaaagagatcttcctggacttttttacgcaggtaatctgtcatttgcttgttgcgataaagttcatgtacagttggcatatcaatcaacttgcattctttcttgctaactccaaacaatcaggatcattaacttgtaggctgcagcaacagagagtatctcccaagttgttaggtttcatgtaacctcgtcgctgagatgaaatttccgttggctaaaaagtgaaagttttgtattgatgttacccaaaacaaaagtattttgcatgttgcttgaagttttggttgtttcagatagtacatcctttgacatgaaaataaatggaaaagcgtatgtcaagcaattatcatctagtttctttgtttctagatactagccgcatttgatcccagatcatttttgaggaagtcagctgaaataccgtagctatccttcagttttcataataaaactttaatggatctgatgtacagtaatttagtgtgcaccgggttaataattgatattaacttcatatagtgagtcttataaagatataatgaacttatatacaatatagtggattttattaatggaaaacatatagtgaaactatatgcaatatagtatgatacataaagacttagacaacaagagcattcgaaattacaaagaacaaaggaaagaacaattgtatcaaaccggttcgaatgaacaaacaaccaccacttccacaatcaatgtaccaccaatcaagactaaactataacaatgagcttctagtttaagtctactttgagttttaatcaccaattcaacgattagatgatcaaaattgcaaaggttaagagttggtcaaacctaaccaagagttacactaggcacatagctttgttaggagtatattagtttatgaattctagttaagttagaaatccaatacctagttggattaggattcctaattggattagaattatagtttagttagaattctagtaatagtaggcgtgtgattaggagatataattagcttaattcttatattgttagtttaattcttatcctcgttttaggtttatctttagtcgaacttgtaccctatataaggggcctttatttcattaataatatagtttattttgagtttaaacctttacttgtgattgtttgcttgagaggttattaatcgaaccattaataacttttcaggattgttaagtttttagtgttaaacatcttaatttcaggagtgattttaagagtgtttagattcttgtattcaagtttcaggactgatcttgaatcaagaaatatccctagtttcgactaatatcataagtagttcgaattcttggagtcttttcttcaagattcatattcataacttgattatttagacttcttggttttgtaatcatatcaagtggtatcagttttccagggaggagaggatacaaagggttctctttgatcaaagaagatccaagggcatcaataagaatgacacttgcaataagttcgagtgatacaaacaacttcaagactcgatcttttgctaccaagaaccaatcttgacgcctgaagattgttaggacaaaggataagaagtgtttctacatccaagattgcattctttacgtccaagattgcgtcaagatccattctttaagttcaagaaaggagtagaaagcattcgaacactacttaaacatgacatccgagatggataagctggctatggccatgagtgccttggcacaatcacaaactgagtcacgcaaccacatgggtaggatggaggcacgtgaccgtggattgaaactagatgactatagtggagatggcaatccagaagacttgttggagtggatttgccaactaggcaaagtgagtgattataggggctttgatcacaagaagagattcaaggttgcttccattaggctcacgaagtatgctggaatacggctcgaaggattgcatgcacaaacttcttgcctaatgactatgaacaaaaacagttcataaggctcgcatcaataagccaaaacacacttagtgtacacgaatacagcatggagtttgacaaattagggcttatatgtgacatagaagagaaagagcaatacaagattgcaatgtacattaaagggttgaatcgatatatagccaagaagatcgaagtctcaacttatcacttctttgaggatgtgactaaattggctaagaaattcgaagagcatgacaaagaagaagggcctaagagttcttacacacctaagtatgactctagtgctaaagggaaatcaacagttccctactcaaggtggtcggaaagacctaagaaccccactacacctaaggaggacactagcatggagaagacaaaagtggccgtacctaaggagagtttaattttgtgttttatacatctttgcttaagagcttaacaattgaaactattaataacttttcaggatggttaagtttttagtgttaaacatcttaatttcaggagtgattttaagagtatttagattcttgtattcaagtttcaggagtgatcttgaatcaagaaatatccccttgttcaactattataattgatcttattcgagttcttggagttaatttcttcaagattcatattcatacttgattattagacttcttggtttagtaatcatatcaatatcattagcattaatttacccccagggagattaagaaaggattagcctaatcaaggcgcttaagaagtttttaggaaaaatcgtgcttgttaagcttaagaattgaacttctttcaccatttgcccttgattctcttgttgaactagaagatcttggttcatagtagatgctcctgcatcatagtagagcatttaattttaattttttaacatgcacgaagatgtaggtagtgtagtatatatcgtgagacgtggtttaacatatagaaagatgtagtttctgcatgatatagtgagtttttgcatgatatagtgaatgtctgaatgatacagtggatcgttccgaattgttgtagtttgtatgatatagtatttttgtgaatgatatagtgagtttcttcatgatacaatgggtttctgaatgatatagtggattgcttagaaatgatatagtgagcttttgtatcatgtagtaggtttctatgtgatataggttgttaaaagatgatacatgcttttggcctcatgtactctaatgttaacgtgaacccggtccttgcaagtcaattgcagttttttcaatattaagctatttttttttttttttttttttttttttttttttttttgtacgggaatatttagcatctttaccacaaacataaccatacgaatattatgcggaaattccagtctgaagtcttaacttttcaaaattaaaagcttctatattatttttggaatgaaaaaaaatgagctatggcatgttattttgaaatacaatgagtctcaaggtgcatagtggcttcaattctacgaataatgaatggactactgatttctaattttttgttccgggcttttgcattaggtaaccataaagatggactctctgtgggaagaactatttcctctggatacaaagctgcggagcttgtgatatcctatctcaactctacttaagatgcctaaatgatcgaggagactccgtaagtcctttctctgattctatctttgaactgagtggaaacacgactgtggtctaaagtagttgatgtctcagatatccagaaatggcgttagtgatattcaggagctgtccattgaccctttgattcattgttgcagtttactgaaagttgttagctggtctcagaaaaacgaaaggaaaaaagggggaaaacaaaaacaaagaaacgtagattgtggtgttaaaatcaagaattccagagatttgtaccttctttatcagttgaattgtttacagtgtgaatcaagaagttagctcgaccttcttttcttgtgaatggtaagatttcgtgatcatcaatacttgattgtgctgtttgcaacttcaacggtaagatttcctgatcttacagtttaattgcttgtgctgtttgccactt

SEQ ID NO: 42 - DNA, 1575 bp, synthetic construct
  misc_feature 1..1575: note = L397E+F420V mutated Beta vulgaris PPO2
  variation 1260: note = n is any nucleotide
  source 1..1575: mol_type = other DNA
atggtaatgctatacgattctcacctctcaggagtctcaactcatcttcaactatcgcaggcatttcccaggaagaacccattaatggccaaagtgtctgagccgggtaaacccacttctgctaaaaggattgctgttgttggtgctggtgttagtggacttgctgccgcatataagctaaagtcccatggcttgagtgtgacattgtttgaagctgatactagagctggaggaaaactcaaaactgttgcaaaggatggtttgatttgggatgagggggcaaatactatgatagagagtgaagcggaggtcacgagtttactcgatgatcttgggcttcgtgagaagcagcagtttccaattgcacaaaacaaaagatacattgcgagagacggtcgtcctgtgctgataccttcgagtcccattgcacttctcaagagcaatatcctttcagcgcaatctaagctacaacttatgttggagccattcctttggagaaaacgctatgcttctaagatttctgatgagcatgctcaggaaagtgtgggtgagttttttgagcgacattttgggaaagagtttgttgattatctaattgatccttttgtcgcgggtacaagtggaggagatcctcagtctctttctatgcgtcatgcatttccagaagtatggaatattgagaacaagtttggctcactaatttccggattaattcaatctaaactgtctccaaagaaggaaaagggtggaggaggaaagccttcttctaatgaaaagacacgcatacgtggttcgttttctttccagggtggaatgcagacacttgttgacacaatatgcaatcagtttggtaaagatgaactcaaactacagtgcaaggtcctttcattgtcctacagtcataaggggatcccttcttcagaaaattgggtcgtgtcttctgtgtcaaaaaattccattgaagatcaacaatatgatgctgtcatcgttaccgctccaatcagcaatattaaagaactgaagattctgaaagctggagttccattttcacttgacttcattccagaggtgagttacctgcccctctctgttatgattactgcgtttaagaagaccagcgttacaagacctcttgagggcttcggagttcttatcccttcgaatgagcaacataatggactgaagactgarggtactctgttttcatctatgatgtttccagatcgtgctttctccgatatgtatctctatactaccgtngttggaggaagcagaaatagagaacttgcaaaagcttcaacggatgaattggagcaaatagtttcgtctgatctccaccagctgttgggcactgagggaaaacctacttttgtgaatcatttttactggaacaatgcattccctttatatgggcacaattacgactcagttctgagagcaatagaaaagatggaaagagatcttcctggacttttttacgcaggtaaccataaagatggactctctgtgggaagaactatttcctctggatacaaagctgcggagcttgtgatatcctatctcaactctacttaa

SEQ ID NO: 43 - protein, 524 aa, synthetic construct
  REGION 1..524: note = L397E+F420V mutant protein of Beta vulgaris PPO2
MVMLYDSHLSGVSTHLQLSQAFPRKNPLMAKVSEPGKPTSAKRIAVVGAGVSGLAAAYKLKSHGLSVTLFEADTRAGGKLKTVAKDGLIWDEGANTMIESEAEVTSLLDDLGLREKQQFPIAQNKRYIARDGRPVLIPSSPIALLKSNILSAQSKLQLMLEPFLWRKRYASKISDEHAQESVGEFFERHFGKEFVDYLIDPFVAGTSGGDPQSLSMRHAFPEVWNIENKFGSLISGLIQSKLSPKKEKGGGGKPSSNEKTRIRGSFSFQGGMQTLVDTICNQFGKDELKLQCKVLSLSYSHKGIPSSENWVVSSVSKNSIEDQQYDAVIVTAPISNIKELKILKAGVPFSLDFIPEVSYLPLSVMITAFKKTSVTRPLEGFGVLIPSNEQHNGLKTEGTLFSSMMFPDRAFSDMYLYTTVVGGSRNRELAKASTDELEQIVSSDLHQLLGTEGKPTFVNHFYWNNAFPLYGHNYDSVLRAIEKMERDLPGLFYAGNHKDGLSVGRTISSGYKAAELVISYLNST

SEQ ID NO: 44 - DNA, 37009 bp, synthetic construct
  misc_feature 1..37009: note = R126L mutated Beta vulgaris PPO2
  source 1..37009: mol_type = other DNA
tattccatcgaatgtagcaaattgactgtccgttgcaatttcggagtttccactcgtcgcatggtaaatggtaatgctatacgattctcacctctcaggagtctcaactcatcttcaactatcgcaggcatttcccaggaagaacccattaatggccaaagtgtctgagccgggtaaacccagtaagtcaaacattcgaatcacaactcaagcaaatttgtcttgtttgcgttatattttgctcatttcagccttttttgtttttccgacctttgcatactgaatattgtgtgtgtgtgtgtgtggggtttcagcttctgctaaaaggattgctgttgttggtgctggtgttaggtaaattttcgtctcttgcagagtttttgagtcatttgggaattctatgtgaaacttgtaactcccttcagtccaacgaacgcagtacaattttctatcaaatcatggtcctaatttccaattttccatatatattgttggaattatattgggattgtctatcactattaatagtattaggatcaattgtagagaagcacagaaatttttgggatcgaaagaatatctggattgccacattaacagcagatataattcttccaattggtttttggttcttcctaccttgacttgtctggtcaaacattataaactttaacctttaatatccattaaagtaaactataggatttttttgtctaaaacatgcttatataacatgaaatttgtgagaaaccaccttatatatatttttttgcgaaaacaaaccttaaacaaaattattatcgtgagaacaaaccttatgccaatttcgatcattgacccaaggttttggcattgaccgtgtcatgaattttgttgggtttaaaaagtcatgtgtcttgcatacgaaatggtaaatgcgggaaccttgggtcaatgtttggaatccgcataaggtttgttctcccaaaaaatgtttttgttcaaggtttgtttttgcaaaaaaacttatataaggtgctttctcagaaatttcatgttttataaagtagtatttgacaaaaaaccctaaaatatattatagaattattattgactaaattgtgtaaaaatgtactcttctaaaagtacattatagtattttagtggaacatttgcgagaaactactttataaatacgatttttgcgagaaatttcctaataaaaaaatgtgaagtgcaaaactatcttattgataattttctactccctcaaatccaaaatactatgaagtctttcctttctggtttgtcccagattagtttgtacgcttccatctttggtatgatcccacttttattatacttattagttttacgtgagttccttactctatctcttttaacaaaaatactcaactatctctatccaataaaaagttccttactagtcctatcacatctgctttttaataaaataacgtttgataaccacacaacttatatccttaaaatacacgttcaaccaagtgttgagattaatttggacggagggaataaatattttttgaggcatattggtagcagtattcggattccgataggttgactatgtttccaatgttgaccaacacttgccttgcatgtaattctaactttgctcttttttattcttcatttccctcgtattccatatacaatgtttagagacccattccttcctcttctcttctttcccttccttactatgctttgccataatcttcctcaaatgagtgcaaattaatttgtcgttgatgtaggccaactgattgtagcacatcttcatagttcatacctcaacacactcgtaattatattataccctacatgttaaatggctcatgaagctttattttatatcatacttcctccgtttcacaataagtgtaacacttttcttatttggaataatcacaataagtgaaaccaagctccaaatggtaagaaaagttcactcttattacaaatataccaccaaaaagtaagaggggatcacaacttcaatacttcttcactctactttattgtggtcccaactttctctctctaaattccttggtaactccccactttctctatgtttcacttatggtgaaatggaggaagtattttgtagtggtatttagctactaggccttggatgatatacaatcatacaatgtatttatattcacgataatttgctgcccaccttgattaccatgatttccaccaattttatcaatttcagtacttcaccaccccgaatttatattttttatttccaaccttggtatctccatttgtctgagtgcccgatccatttgtatcgcctccagaattgaagaagcttcctgcagctagacaattaggaaggttaaaaaagtttggagatggtggaggatagccataataatcattgttgggaggtggaacttggaaggttattgtagggttgaagtccttgatgaagaagaattgagttcaaatgagaggaaaaaggagcagggaagagggacaataagaaaaaaaagggtaaactaaaatcacgtgtaaggcatgtgcagatcaacatcagaaagcatagtcaacctactggtattagggcactgatacctttttgggtcaaaatttttttacaaggtatttcatgaggtagttttgtccatttttttttttacaaggtatcgtctcattttttttttatcatttagtttctcgcaataagtgtatttcatgaggtagttttttccaaaatttcctcatttattataaaatacctcatcttttccataaataatgcaatgtctagacttttacgctgtttacacatgctcctttgaccatctattgacacacaaggaaaaatagagtagagtcatgcaggatcttgttagatttttctcgatatatactttcaaaagatcaatttttttataattttttttttgaggggattttttttttataattatgtacttatcaaaggtcaaagttgtgcaccgggaagcataaaactctatgtgttgcaatttacatggaaggggaggagtataataagagaaaattatggtaaaaggttcattcctggagatcatgagaaaggaagtagaaagaacaaaaaagaacaatgggagtgcttttcaatgtttgttgtacgtagcatttattcatttgctataatgttttgtgacattgtagtggacttgctgccgcatataagctaaagtcccatggcttgagtgtgacattgtttgaagctgatactagagctggaggaaaactcaaaactgttgcaaaggatggtttgatttgggatgagggggcaaatactatggtaatgtttttgattattgcaggtcttgcactttagcgcacaattaatttctggatttttttttgtactgtggtggttatggtcatcaacatgtctcacccactgtgcttgcagatagagagtgaagcggaggtcacgagtttactcgatgatcttgggcttcgtgagaagcagcagtttgtaagtctttcattatctgaatggcacatactttatttcgaaagattgtaattgccttttctttctagatggcttcatcttcatgttgctttctgattcagtttcgtggctaactttccaagtttgtctgattgctaactctgtcatagccaattgcacaaaacaaattrtacattgcgagagacggtcgtcctgtgctggtaagtttgcttgttttacttttgacctcttttaagatctttcaactctggagcctggaaacatggtgatgcaggaggcaagttctctctattttacatcctttcttctctgtatcttatgacatttgcctcttattctgtgcagataccttcgagtcccattgcacttctcaagagcaatatcctttcagcgcaatctaaggtcgttttatgttaagacatacttgatgctgagagtttattgaattcttaaccttcttcttattttttttttatttttttagcaaaaggtaagtatattgcatttaccaaaaaacagtatgtacaccaccacagcagccatgtcagaatctagaaataccaccgaaaaaatcctacacccaaccagagacagttatattatatcctactcctaagtttctgtacccaatttacatcaatattggtccatttacaagatatttttataattcacagaagcacatcagttttaattagtttaataatgacctctggatgaataaccaactcagaccatatagccttattcctggctttccggaagttgtacgccagagcagcaagcacagcaatgcaaacctgtttcttatacctccttttatgtgtcttagcccatctcttatagctagtgaagatacagtcgtgtgcacaggattgaaccccaatccaactagcgaaagcctcacaacattatgactataaatacatctgaagtataaatgctgcacctttttctcctcttgcctgcacggtatcagaacaaatcccagctttagctaacaattccctggttttcagtttattcaatgccatcatgcaagcaatgaaagaatgttttggaacattcagtttgttccaaacacagtgagagcaagggacctttcctgcagttccacttagccacttatatccctgactaatagtatgactctttgcaccgtaaattgatttcaacttaactttttcataagcagtgaattgtgtgttgttagagtgtctagctgtctaggagattgggagaaaaggagggaccaaggagatagaaacacacctttgtgtttctttgtgtatttactttttagggtgggtcacgttttctgagaaatttgggaaaaggaagaaatagtaacacactttcccatttgtataacctgtatactggagctccaatataatttgcatttttttttgagctgcaagaatatgttgacaaacagttattgcttcttcctcagctacaacttatgttggagccattcctttggagaaaacgctatgcttctaagatttctgatgagcatgctcaggaaaggtaatgtcaagacatgtgttacctcgccttaattttcgttccaggaggtgagcatgcatttagaactaaaaggcacaaagactgttggtggtcttgcctgttcaaatataatggagaggagttttcgctacatttaccctctcttgaagtggggttgaaatatagcatcaagttgaatgcttgattaagtttaaaggacttgtgtaactctttttctgtttactgtgattacatgacctggttgattaacataatggtctgtttatctgtagtgtgggtgagttttttgagcgacattttgggaaagaggtaatggtttaccatagtatttctgctttagtggtaaattgtaatgttgctgataattatacttcgctgcagtttgttgattatctaattgatccttttgtcgcgggtacaagtggaggagatcctcagtctctttctgtaagtgaacattttgtgcttcactcccaattttttggaggctggaaatagattcttttccagttgttctgtcaaaaatagatgtagctttattttgaatttgaagttcccaattgttcattttgactattactgattattgctaagagtggcattatgctattatgctcctaaaagaaaggtgaattttgacctacatatagtataatgtatcaatattggtttaattgtttgttcttttgttccttttggtgctcatcttgcgccttgttctcatcgctcgttttttcatgttgcacttgatttaaatttgctcagcttaacttgtctttttgaatttatattacttattgctatattttactaatttcgttgaaactaattttttgctgaacttttcgttttgttgaaatcatttttctgaattaacttgattttcctgaatagaattgaattttggtgatcttaccttttctgcagccttttatttctttcttgtcctttttccaatctcatttttttatatttccattgtgttgacatcttatcattaactgtgcagatgcgtcatgcatttccagaagtatggaatattgagaacaagtatggaccataagacgtttattttaatcgacatgtatgtttcttagtttatacatatattaattctgtggtaaaaaaaccgaacaagaatatctttttttttttctatcatcaaaaagggtgaatatatgtagaggaaaaagatttgaatcaagatattagcctaaagcaataataatgttagtaatagctttaataacaaattcaaaacgtacattaatgaaccgagaggccggaaaatagttaaagtgaccactaagagaagcgaaggattcatgatgggttttcaacccagtagggcaaatttgttcaatgttctttacaaatcaagcttattaccttgtgggtgtttttgctagagatgaatgatagaattttccctagttggaagtcttttttggttactttatgggagctagtgatgtaatttgtttcgccttatggcatttcctaacatgtgcttttgtgatgtattgaagctttttttttgccttaatttatgctggattttaattttgttctttgtttcatttttcttgcttttgaaaaaaatatatagatatgtatatattaggattggtcgaggattttgagggaagggaaagacctaagaaaacttggatgagggtgattgatagtgatatgagtctatttgggatcgaagaaaatattcctttggataaggtgtagtggagggttgagggagcaaatttatgcagattagcttgacttaaagtttttctttttgattatttttcatttacttgtgttttgcaaacatttactcatgaatgatgtaaacttcttcaaccaaatctctggaaaaaaataatctacatggaaaaaacattattaatgttaacttgacagagatcccatccttgtgaagcagctagcaattaggcatctaacaattgacattttaatggacaggatagaatgtctcttgatagtcaataccctctgtttcattgtatcccatagctactaatctagtttgtatctttccaaagaaccattattttgaagtttcaccttgaacacccattttgaaccaatatgtttcttgcccttggggagaggggctaattgccatgttttgatgcggatgcaaagacacttgttctacctgagcctattgacttgatcatggatactctagggtttgaactcaagggaaagaatcaagtcttggcatgtgtggtgacatggcgtggggatggagtaaagaagagtcatagttctgttaggatatgttcttgcttgctacatagaatcgtagttctgttaggattgctatgatattatatctagtagatagattttatagttaattaggataaacatgtgatgatcatgttataataggcatgtgattagaggataggattagcttaattcttatcttgttgttagtttaattcttatcctagttttatgtttatcttagtcgaagttgtagccatataaagggcgttccattcattaataatacttagttttgctttgtgttttaaacatacttcttgattattgtttgcttgtgagctaactaatcaaaccattaaagacttttcaggagttttagtgctaaacatcttaatttcaggagtgattttaagagcgtttagtgatcttgaatcaagaaatatccttgttcttgttcgactaatatcagtggttttgttcgagttcttggagttaatctcttcaagattcttattcaacttgattgttgagcttattggtttagtaatcatatcaagtggtatcagttttccagggaggagaggatagataggattctctttgatcaacaaagatccaagggctatcaacaaggttcaaacattgctgcttgttcaagacttgatctttttctaccaagatgcattctttacgtcacaaggtagtaataacaagattaagagtggtttttacatccaagaatcaatctttcacgtccaagatttcatctttcacgtctaagattcattctttaagatcaagaaagttataacaagcatagaagaacacataaccatggagtccgagatggacaagcttgccaaagctatgcaagcacttgcaaagtcgcaaactgaatcacagagtcgactcaatgagaatactaccacaatcaatgggattggtagtaacatgaataggttggaggcacgcatggatgccattgcaaccatcatacaaaagaagcttgatcggaatagtgccaacttcataggtgccaattcagaggaagagttggcagaacgtgaagaaagatcatccaagactacatacaatgatgatcgtggcttaaagttggatgactataatggagatagcaatcgagaagacttgttacagtggattcgacaacttgagaaggtatgtgattatagaggctttgatgacaagaaaagattcaggattgcctccataagactcacgaaatatgctggaatttggcttgaaagcttcaaggcacaacgagccaagaaaggtaaagaaaagttgtgtagttggacaaagttgaaagttcaagcttaaagagaagttcttgcctagtgactatgaacaaaaatagttcataagactctctactataagccaagacacgcttagtgtacatgagtacaccatggaatttgacaagctagggcttatatttgacatagaggagaaagaacaatggaagattgcaagatacatcaaaggcttgaaccgccacattgccaagaaggtggaagtatccacttatcacacctttgaggatgtgacaaagttggctaagaagtttgaagaacatgagaaggaagagaagcctaagagttcttacacgcctaagtatgatactaatgctaaggccaaggctagcttcctactcaaagtggtatgaaggacctaagaggctaagaacctcaccccacctaaagaagacacaagagttgagaagcctaaagtcgtcgttccaaaggagaaatttgaagagatgagaaagtgcttcaagtgtcaaggaaggagacacatagcaagcaattgtcctaacaaaagagtcctcaccatgagacaatacctagctttgcaagaagaggaggatgtctattagttcgtccctgatgaagagcaaacttaggggaagaagaggaggaggatgcttttgctgaggatgatgcaaggctagtaggggtcaagaggcgcaccttacatgtcgaccatacacctagcatggagcaaatggaaaaatcttttccacactagatgcaaggtaggtgactatatatgtaatggtataatagatagtggttcttgcactaatgttattgtatctgaggtagtgtcaaagctaaacttagctacaagggcacaccctaagccatacaagttgagtttgctagatgatagcactggcatgagagtaaagaaacaagctttgatttcattctctataggggttataaggatgagttatggggtgatgtattgcctatgagtgcatgtcatctcttgcttggaagaccattgcagtttgataaaaaggtcatccatgagggggactctaatgtgtactctgtgttggttggttctaagagggtatgtttgcatcccttagctcctcattcagtggcgccaaagcaaccacctaagacaccaagttactttctatcttcaagggagttcgaacaagaggtggaggaagaaggttgtgcttatgccttgattgtaagacatgctgccacaagtgtcaagactactagcaatgagaagctcgaagccttgatgaaagagtttgaggatgtctttctagaggaactacgacccttgagaggcatagaacatgctgtagaccttgtacctggcgcccctttgcctaacaagcctgcttataagtgtgatccagtggcatctagggaattgcaacgccaaattgaggacctaattgaaaagggctatttaagggagatcatgagtccatgtgttgtgccagctttactagttcctaagaaagatgacacatggaggatgtgcatagatagtagagcagtgaacaacattacagtcaagtaaaggtttcctatgcctagattggaagatatgttggataagttacatggggcatcaatcttttctaagattgatcttcgaagtggctaccaccaaatgaggatcagagaaggtgatgagtggaaaacaacattcaagaccaagcagggattgtatgagtggatggtgatgccatttgccttatgcaatgcgccaagctctttcatgagcttgatgaatgaggtacttcgtccgttccttaacaagtttgtggttgtttacatagatgatatacatatctatagccaaaatgtggaggaacacttgttgaacttgcgtagcttattcatgaagcttagagagcaccaactctatggtaagattgatggcgacgaggttgacgggggattatggcggcagtgaatcaccctctttgccggtcactgaaatacaacctgaggtatctttaaattctgtaattggattgactaacccaaaaactatgaaattgctgggaaaaattgctggatgtgaagttgtggtgatgattgaccctggggcaacccataattttttatcactagctactgttgagaaattagctattcctgtgtcggaatcggaaggatttggggtttctctaggggatggacaggcggtgaggggtagtggaatttgtagaggggtgttattgagtttaaatggtggagttgaagtggaaacagattttcagcctctgggtcttggtaattcggacgtgattttgggtgtacagtggctggagacgttggggacagtggagagcaattggaaaacacaaacaatggggtttgaaatcgagggtgtcaagttcactttgaaggtgacccatcactggcgaggtctcgaatctcactcaaagccatgatacgtaccttatgtaaagagggtggaggtttgtggcttgagttgaaccagattgagcattatcaggagaaaacaccgcattcatcagccttacctgaaattccagttttcttacagagagtccttacccaatttcagtctgtgtttgctacaccagaaggcttaccaccgataagagaacatgaacatgcaatagttcttagagaagggtgtaatccggtaggggtaataccgtaccgttatccacagttccaaaaagatgagatagagcgcctcatcaaagaaatgttggcttccggaatcatcaatccttccacgagccctttctcgagcccggtgatattagtgaagaagaaagatgggtcgtggcggttttgtgtagactatcgggccctcaataaagaaacggtccccgataagtatcccattcccgtgattgatgaattgttggatgagcttcatggggcaacacttttttcaaaactcgacttaagggccgggtatcaccagatccgggttaaggccgaagacactctcaaaacagcttttcgcactcatgaggggcattacgagtttttagtaatgccatttgggttgacaaacgcgccggcaacgtttcaatcccttatgaacgaggtcttcaaaccattcttgcgcaagtttgtcttggtatttttcgacgatatattggtctacagtagttctgccaggaacatgaggagcatttgaccttggtgttgcacaccctagcagctcataaattgtttgtgaatcagaagaaatgtgattttggcaggtcggaagtagcatatatggggcatatcatctctggtcaaggggtggctgtggatatggagaaggttcaagcgatggtggaatggccccttcctaaaaacctccgggaattacggggatttttgggccttacagggtactaccgcaaattcgtacttcactatgctcatatagccaagcctttaactgatcaactcaagagagatgcgtttgggtggtctgaggcagcaactcaagcctttgaaaagctcaagaaggcgatgatcacatcccctgttttggcaatgccggacttccaagagttgtttgtggttgagaccgacgcatccgggtatggtctgggggcagtgttaatgcaaaacaaccgacccattgccttttacagtaagttgttaggtgcccgggctcaattaaagtcgatctacgaaatggagttgatggccatctgcatggcagttcagaattggagatattatctgctgggtcgacatttcctcattcgtacagaccaacagagtttacgtcatctcactcagcagcgagaagtaagtactgccttccaacgttggatgagtaaacttatggggttcgattttgaaatacagtttaagccggggtgtgccaaccgggtagctgatgcattatcccgcaagacagtgggagaggttgaattgggtgcgctgatattaactcatggggtggactggaccgacttggagcgtgaaattgaaggcgatcctctgttgtgcaaaattaaacaagacttccacgggggtgctattactcctgtgcacttttctttggtggacaacaagctgttgttcaagggtcgatacgtgattcccagctcttcggtttttattcctaccttgctgcgagaatatcacgattctcccattggagggcattcgggggacctcaaaacatatctcaggatggctgccgactggtattggaggggcatgcgcaaggatgtggcgcggtatgtgcaacattgtagcgtgtgtcaacaacaaaaaatgtctcaacagatgccagggggggtactacaaccactccccataccttcctcggtttgggatgacttgtcaatggacttcgtggaaggcttgccatcttccaagggggtaaacaccatcctcgtggtggtcgatcgtttgtctaagtacgcccacttcctcccactacgtcatccatttactgctgtgtcggtggcaaatgtgtttgtcaaagaggtggttcgtttgcatgggtttccttcctccattgtttcagatcgggatcgaatttttatgagtgtgttttggcgggaattatttcgtttacatgacaccacactcaaacgaagtaccgcgtatcatcctcaaacggatggtcagtccgaaatcgtcaatcgagctctggagacttatttgcgttgctttgtgggggaatacccgcgctcttgggctcagtggcttgggccgaattttcatataatacttctcctcatctctctaccaaaatgaccccgtcaaggtcctttatggtagagaccctcctactgtgatacgggttaatcggggagcctcacctgttgaaagcttggaaaacatgctccaagagcgagacgcagtattagatgccttgcagattaatctgattaaagctcaacagaaaatgaagagtagtgctgatgctacaagaagagaggtgcattttaaggtgggagatcgagtgtacttaaaattacagccttaccgtcagaaatctttggcttaacgcccttatgagaagttagccgcccgtttctacggaccatttactattttacagaagattgggcaagctgcatacaagttacaacttcctgtttctagcaaggtgcatccggtgtttcatgtctcccaactgaaacaggccgttggttccattcccgtttcagccactattccagagcaattgtcttctgacttggagttagaggtggaacctgatgaactcctcgatgttcgtagtgtttctagaggccagcacacttacttggaagctctcattcagtggcagggattaccatcattcgaagctacctgggaagatgtggctgctttccatcaccattttccatccttccaccttgaggacaaggtgaaactttgggggggtggtaatgtgatgcaccaaactaccactccactactcacctattagaggcgtaagaaaaagggggtaaatcaggaatagtttacaaattctgttgaaaggaatattttgtaattatgatgtcagaggttgttagcaaaaaggcagtagagtaacaataaaaaggggaagggaggagagaagaaggtattgagatttttgtaaggaacttggcccttgggagagttgggagcctctcgaaagctcaccattatcttgtgaatattttccttcctggttatatacaagaaccttcctctgtcaatttcttttctctctaatcttatttcttattctgttttctggttgccattgtttgaagttgcttgttgtgcttgagtaaatacgtgaagtggtgaaacccatctgaattcatcacatctattccaagtggtataatacaagcttgtaatccaaatctaatgagaaatctaagttatgaagaatttcaaaagaactaagtacccttgttttggatgcccaaggatttacttgccgctcaagttaatgctcaacgtgcaagatacaacctctttagtatcccaaggtagtttccataagaattaattgagctcaaatcaagaacaatatttttatgtattaatgtgaacacttcctgaattatattagatatatggtctgaaggttggaagaaagattagcttttaattttaagtttgagatagtttttagaatcgaggaaagattagctcttaacttgtaaactaaggattgctttataagtaaaacattagttatggaactcttaaaattggttttgaacatttctagttaaaaatcccatgtaattctcccaaactagcttaaaatctcacatttcacaagctaaggagagacaaatggcgttctcttgtgaaacaatctaaaattttcattaggctactgttttcaagtatttatatgttagaagtgccgcatataggtacataaaataagtttacaaacacaagtaggaataaggaaaactaaaagagaaacttcagccatacaaaaccggctgaaatcagctactactttctactttctagcttcaaaatctgattgcaagtctcctttaagccaatcaccaatgaaaacctttcctccacatgaagtgtgctcaaatcaagagaagaaacccatcattcgcctatagctacctgggtcagatgaagatacggcaaaaaaaacgctggaaatcagtgaaccaaaataagcaccaattggatgctttctgtccttgctacattttcttctcataggactacttcaagccatacatgaataagcagttagatccagctcctagcatccatttgatcgtacaaatgagctccaaaaagataagtaaaaccaagcagccaaaacctaattaatactaatgatgaattagttgaatagctaatgacgatgaagcaacactttagtaggaatagtgttaattatgatcaatgctacttaatcttctgattaatttttggaaaaatgtcatatctaccttctgtatacacttattcataactatatcgtattattattatttttaaataactaccttttaagtaccaaaacctaagaaatcaggcacttgatggattccatccaaagatccatttggcggggcccactaactgacttttgattttttgcctttcctcttttggttaatctcaatggttcatcaataacaactcaatcttctccccatttcatcaaatcatccctaaatcagaactttttcaaattcacccaaatgaggttatggaaacctctaccaagtttattcgaccacttttagtctagctcaaagttttacacttgcttcaaaaactaagatttattaactttagaaattaggtttttatttttattttttatttaactttgtaacaatcttaaataactcaggtgctttctagagtttggctttaattgtttttcccttggttatgtgaaagaagtatgactactttctccaagactaaagtagagagcaaaaaatgcaattctggaatttcttgcaaaagaaaaggaacgagttaatgataatgaaaaacaaagaaaatgatgagaagagaggagctgaatcaatcatgatcatgtattttaaagttttttttgctattgaagtgacttaagaagaggaaagaggatgagtgaagacaaacaaaagaaaggataaatagagggaaatcttgggcttagaaaggtgaaaaggtaagaagatgagttagtgggccccaacaaatgtatctttggatataatccgtcatgccactgtttggggcttgcttaagtccatacattacttcactaattttacaaaatttattttcttgaccaagaactgaaaaaaccttcagtggtgatctattaggttttggaagttaaaaggtagttatttaaatgtttttaatataaaaggtagttatttagatatttttaatataaaaggtagttatgtgaataaaagtgtatataaaatgtaattttttgacatttttgccttagtttttcttgctaattcaccttttcaacttgaccaagttgctatgaggagaaaacgagcaattattaagcaaatcgcaacactagcattaatccatggcccatgaaactctccataattagagattggattagcacttagtagaacttcttgctcctgctccaggtttccattacttctttatctaagtgcatcaaaaggttgttgggttatgaaaggtggtggttgtgtatagtcattgtcaaaatgttgttaatgcactctatttagaggatgagggattgaatagttttcacctcgtgacctttcattcctttttaaaaaaattgataatgtgtattggtcctatgactgtatgaatggtaataagctatctcatgagctgttactatcttcctcagagtctaggtagaagggtttgggctgataattttctactatgtgcaattagtttgttggatttggatatgctagttgatataggtcctttcccttgggccttctcttaatataggcctacagtgtgattgaagataaatcttctggagaatataagaacaatgagatggattggttagaggttgatttgttcttttggtgtaagactatttcgggttctctattggttatgttcagacgccagaatatgtgttggtgattgttttccatgaacatactttatccgcagagacatttttcttttttcttcctataagattatatttgtttcctctcttggtgctcatctcagtgtctctactttacgttaaactgttgacattacttgacaatgcgtatatttgtcgcatggtgctcttccctcactccacgtcgaccccatacatcaaaaaatgccattaaagaatattcgaactcacaaccttgtgttgaaagaatggaatccctaccaatgactcattaattcattttctctttaagaaataaatgatttcctcacaaacttttaggctttaagagcccaaaagataaaaacataaaataagatagacatcaacgtcaagattagccttaaatgcacaaagcacatgtcaaatgattgataactactcacgagttgcaactctttgggcgttgcctaatattaattggatctcttttaaaaattgttggtggttatggttggtggagaggaccatgtaacttttagctggtcacaactggtaatgattgtcacttttactgcccataaaaaaatttaaactgttgaatatgtttctggcagtggatctgacaaatcctttacaagttggcgtccattttgttttgccatgtgactcaattataatacgtgagttttattatccaccaggtttggctcactaatttccggattaattcaatctaaactgtctccaaagaaggaaaagggtggaggaggaaagccttcttctaatgaaaagacacgcatacgtggttcgttttctttccagggtggaatgcaggtattagcatgtagctttcattctgttaacatttgtggttcttccagacatacatccaatgctttttttttttcttgctataaccataaacattcttgtcatgaacattctttaatactgttgctgagcttagtgtattcgttcattcatgtaatttcctctcttgaggttaaaatggcatacagccttacaacctatatccataatgctccttagagtagaatccctaggttataacatagtaccacttatcaaaataaacatggcacacactgcaggacaagaagtaaatccacctagagaactgagcacctagtagtaaaagcagcgatacattactaataacagtagcagggccataagagtagtaaatgggcctcatttcaacactccccccgtaatggtgagagagaagaagcagtctgaactcccagcttggagagcaaaatagagtgttgctgaacagggagaaccttagtgaaaacatctggcacttgatcttgagatggaacataggtaggctgaataaccccttcttcatttgtattgtccctcaggaaatgacaatctatgtctacatgcttggttttctcatgatgaactagatatgctgctatggcaagagcagcttggttatcacagtagataggagtagcactggactttttaatgcgaagatctttgaggagttgtttgatccacatcacctcacacacagcaagagccatggatctgtactctgcactgaccacaagaaattgcctctttgactttcaagatacggggggagtcaccaaggagcacacaaaaccagatgtagaatttacaacacccatcccattcactatcacaaaatgctgttagttgagcactagacttgttcgccatgagaattcaccctgttggcagcttgaagatgcacattagtggggcagtgcataaatttgcttaaatcatgtatagtgaaggcaatatcaggcattgccttgtaatagtgagataaatgagcttccccatcaatttttgatacacatcaggttgttgaagaggatcaccattgtcagcatagagcttgacatgtgagtccatacgaagcctcaatcgtctgcaatttataaaaccatattcatcaacaagacccatcacatacttctttagagataaaaacgatacttcactacactgatccacttcaatcctcaaaaaatatcttaggccacccatatctttcatgtgaaattggccagcgaagaaactctttgcttcctcaatagttgctaaactattgccagcaagaatgaggtcgtccacatacaccaatatagcactgaaacagtgagagttttgcttgaagaatagagagtagtcacacttggattaagtgaatacattttgctttaaagcagtgttagcttggcaaaccattgcctcaaagcctacttcaagccataaagtgacttaagcagcttgcacaccttagttcatttggtgtcacttctgccatcagtacttagctccccctctccttgaactttgatcctgttacatgtttcactatatcctggtgatagcttcatgtatacactatcctacaattcaccatgcaaaaaagcatttttaacatccatttgtttgcaagaaccaaccctctaaggatgcaacaacaagcatgtggtcatctttgctacaggggtaaaagtctgctcataatctattccatatctctgtctgtcacccatgattacaagccttggcttatgcctattatttgtgccatcagtgctgtattttgttctgatccatccatgtgagggatggctcatttctacaaaatcctagttccgttaggatttgtgttgttttcctaattctagtaggaataggactcctaaaatcctaatcctcctagttctgttaggagtttaaaagttttagtttgattgtaattctagttgtgttagaaatccaaatcctagattcatgtcacgtatggttagaacatggctagtaggataatttgtcttgtgatgtccatagccttggcatttgtggcacctaactttcaatagcttgtcttctgtctccttttctttctccttctttgaggaatcaacgtttttagagctatctaaaccactagcatcaatattaggtttaaaagtgctaaaagatttcgaatagttcttacttgcatacaatttctttttctagtttatgtagcgtcaccagggaacaaaaactcggccgttccgttctggaacggccgctttgtaacggatttcagagaggccgttccgttaaataccgttctagaacggtgatttggaattcacaccaaactcggcgcgatagcgttacgtaacggtgtaacggcgttccagaaccgttacaatcacataacgtccgttatttgaagaagaccagttcttttggtggaggaagaagaagagccaacgcaagatctatagatctgagttaaaatttgaaaataaaacatgtttttttatttaaattaaagcttacagaggatgtagaactcaaattcgagtaaacccctcctttaatttcattaggttactgcaaatcgaaccctaaattgcaaaccctaatttcgaaaaaaccctaatatgcattgggatgcaacgctgcttctccggtcatggcagagaaggtcgacgagtcatcttcggctgcttttagcactgtagctgccggtggttggcttgtttgcaggttagtgcttgctggttttctttctctcataccgatcatcttcttcttttctctcttctctttttcttttttattgtgtgactgccagtcacgtgataattgcaactcataaagtatctctttctctctcttcttttcatccctttttatttttctttcccttttagtttttattccctcacgtggaatcacctaattttcatccttttttatttttttagttacactcttacacagaagtatgttcaaatatcattatagtacctcaaatattgtatttataagagttttggacataatatgatatagaaagtaaaatagaagaaaaataaagtttaaatgtcacttgtgtgatttttttaaaaaaattcacgccgcgacggccgcgaaacgttctatttcccgttacaagccgttcccgcgataacgcgaccgttcccgcgaacgcgaccgcgaccgcgttttttttccttgagcgtcacatcttgcaagcttcttcaaaggtgagttatgtgtacaactccaatttctctccaatcccctccgtcctcatttaggcctccaaggaagctacttaaacattgatcttcaagttcatcaattttccaaagaatggataacttctcgaactcctttatgtaatcttcaacggacatattcccttgtttaagagtagaccattccatgtacaagctttgtttgtagttagaaggaacaaaacgtcctcttaacaactttttaagcttatcccaagtagagattttgggtttattagctttcacacgctgcctctttactccatccaaccaaatagatgcatatttggttaccttaagcacggccaccttgtatttcttttcttttggtgtctcttaatcccaagtagagcttttgcgtgtgaaagctaataaacacaaaatctctacttgggataatcttcttcttgtttccgaaacaactaattcttatggtagttaggaaagcaagaatggtttctaattcaatagggaatatattaattattattagtttaagttaaatagtgcacgaatctaaatagattattcgtctcaaaatctcacttaagtatagatttgtttggacatctgagggaagaagaagagagcgagataaaggagaattatcactcaatgaatccatatcccgagttttcccatttacttctttgaaagcaatatagttcacgaggtcttattatcagtctatggacataagagtaataatttaagggcaaaaactatgactttatgggtttaaactgatacatgttctgttaaactgatagatgttctgtgttaaaccgatactcatatattcctggttaaactgatagatatatgatttaaattgatacccgtctcagtcatgtcttggattgagacggtctgacacaagactttttgtgtattatatatctgattagaataaatttatcctgtttactaattattttatcttctccagacacttgttgacacaatatgcaatcagtttggtaaagatgaactcaaactacagtgcaaggtcctttcattgtcctacagtcataaggggatcccttcttcagaaaattgggtcgtgtcttctgtgtcaaaaaattccattgaagatcaacaatatgatgctgtcatcgttaccgtgagttttactttgcttactgctattgcaccaatctttcttcttttgacacactgataatggcaatgctgttgtggtttgaagccatgttatggggttttagggatatttatggagtctgatctaatatgttattggataaaattcagatctgtaacgtgactcaatgagattgaaaaaaattgaatcaagataatggattggaaaattaggagctaacctagggtctataagcgatccacttggagtctcataccaagcaggtattcgacattttaggtttatattgctgctatggctcatatgggagcctacatagggtctggtgcttattcctttttcttttgtctagttttggggctgcacatttctgttgtgttttgatatggatagccatcacctgcaattgcatggaggctgaactaagttctataggggagcaaacagtatctgttggaaatttattttcatattgtgtttttaaatgctataatccaaaatttgttgttcccctaaaatgcctaaaatacccttatgtaactgctccatctgtcccttaatagacttcccatttctccaatgcatgtttgccaatacacattttgtattgttaatatcaaaaattacatattagtaaaaattataaaagtttgattttcctaatgtacgcaatgagacgaatcaaacaagacgccatatgactatgttttttcttatacttcctatgttttttaataagtgacatgttttccttttagggaaatgtcacaataagtgacacatagctcaaagtagtaaaaatacttctcatttattacatctttgccattatttaattgtttcacctacctactttatccaatactcaaatttgattggttgaacaattggtcccaactttctctagactccttggtattccctttcccccactttctctctgtgtcacttattaaaaaatggaggacgtatattggaaaaaaattggaaggttttcttcacttatgaatagtggtaaaattagagatgggaaggctattttgggatggatggagtaatatttaaatttttaaaataatgtcattgttttagtgatgaaataaaattcaaggctattttttctagtaattatgttatctgtacatcaccacacgtatcgcgtgcatataagactagtttgatgatattccaacactgttcgaaggaagtcaggcatggaaccatgtttgcttccatatgggaaatattttgcttactctccttcaaacatctacctcattatcccagaatgattgatcgaatctaatacaaatatacaattgatcatatgccaccagggaattacatcaaattaaatttttatagaaggggaatcagtcatagcctcatagggaacgaataagtgatactcgccagtttctttcctggttacttttcctcttctcactagccatcctttatgtatgggtatgctgcatcattcctgccactggttgggactcccgtttgaactatggggggatgggaaagctaagccatcatcttcaaattgagtttcttgagaatgtaagacaccatctgtaagatgaatatagtgcactctatagtcaatgtcatgatctttatgggtttatctgctgaaataactgtgatatacccagctctccatttacaaagttttcctacatattaaactcttgcccgcaattctagaacttcattgtagaacttttcctacataagcatcatttgtcttttctgtagtaaaagttagaaagagctttattttagaacattcgtttttagttttctttgttgttgattactccgccacttttaatacttttatgattcaagtatttgacaaaatcatgtaatttaggtcctctgctgcatgcagtctataccctctctctctctctctctctctctctctctgtggttgtgtcttacttgttgagttactaactccagccattacataaagtaggctggcattatgatgagcaaattactcaagaccacatgttagctcctttttcttttctccttattctgaaaggcaaatataggtccatcttggtgcttctcatgtcataagtaagctgaccccctccttttccagggaataggacaataatccaaaagtgagggttttacatgttgggatttgtgaagtttcttattttacttaatagccgagtcagtgttacaatacatagtaccgtgttacaaaatagtatgtaacaccaagcatgtttatgtgcaaaattgtgcaagactttgttgctggcacgccaagggctgttttaatgtagtttacttattcttttaggtttttcagatgacaatcataaagggaattaggagtgtttttattgtagtcaatccctattgtgctacaacgataaaagaaaaaagcacaagactagaaggagaagtaatgtctaggaaagactcctcacctggggttgctagtcacctacacatcttagaaggcatcaaaccaaagcttattcccctcgactgttttcgggagaaaagaagacaaaattgtttctaacttatactttaccagtttcactacagcatcagaaagaagcaaaatatgctcccacaacacggcgaacctagctttccagatgtgataaaccagaccagcaaaatgattattttcactagagctttgagtctattttttcggtttttccccttcttcctggtaatgtcacgccaccaagccatcatctcaattttttgagatttgacgtaatcgctcaaatagctgagtaagacacttcttgctctaaatactaataaaaaagaggtgaatgtgggtctcagccatgttactcaaatcggataaagtgtctactcttattagggtttttgggtgttggactcatccatttttttttgtaaaatgtcaagattttggtttgaaatgagagattcaagtgtcgtgacatgagtcggcacgcaacacttaaacgtgtcgaagtaacagagggtctcagacaatcaactttaatcaatcacgaaccccaaaatttatgcaacctttgctcatattcagtctctgtaaagcactcaactgcagcacacccacccattcgcttcacctacagcaggagggcacccaagtaattgctatgatgagcgaattattctgttttgccttgctggaatattgctgttagatttgctgactcactggcagttaattatagtcagagaatgagaaatatcctgtagagagagaaagggtatcttttgtatttagctctataaatagctaaggaagggaagggcattgagagtttatgatattataataggagagatttagcctctcgaatgctgataggagcgtagctcttgttggattatcaatactactctgtttgctctatctatttctactcaggttccttcttgtacagtggatccctgattggatttacttcatcaaccagcagataaaattatttgtaggcacattgaaaccattccaaacctaatgaggccaaagtttatcacaaagaatataggagccaaatgtaggcaacagataagagtataattgccagaagttgaagactccaggtattgttcagaaaccttaatgcatatcatcattctgacactagattttccccggagccaactaacaaaaatgaattaaagagattaaggctatgtttagttcacctgaaattttctgatctgaacttatctgatctgatctgaacttattttttctgatctgatctgatctgatctgaaccaatctgattacaagatcttatcttttagatttttctcaatatataagaaaaaatatagtcatgtggggtcttgtttgattcgtctcaatgagtactttattaatattcaattattataatttttactaatatgtaatgaaagatataatgatttttaaatataagcatgatctgaactgatctgatgtgaacttattttttctgatctgatctgatctgattagatctgaaataagcaaaaataaggtgaactgaacatagcctaagcaacaattgagggaaaataagatcattatggctaagataagataaatatgtaatgataaaatcagagtaattatatcagttacactctcaacattcgtcagattgaggtttcctcccaaaatgccaacccacttttctgtattttcacgtccttctctctacccttctaggtatatattacatcagctgtaaaatttttgaaccaactagtagaatactgatctaccctcaactgcctcactttctcattttttctgggcctttttctctctagcacaagtccacataagtgatgcatagcagaaatataattccactagtcatcctcaatattgatataacaaacacatcacccacatattatcatttttaatcgctgcatgcgaggcatacttacccaccaatcaggatatgcataacagcgttcctaattccaaaaccaccatatatcttgggtttgcaactctcatccctagcaacaaggggactttctgaaaaagtggcagattccgcccacaagtagtttgtacggacacctttattatattattaatatcatatttcggcaacacaaattaccagcccagtaaaacatgaattgacatgagactaacaaggggcccaatctaatatcgtacgtctgtactaagcaatgtataaaaaaaagctcaaggtgcattgatgcaatagggatcctaatgtgcataggtgcgcctcattgaagtgaggcaccactaaggataaataaaaaagattgatgtaaaattaaattgtgcaccttgggtgcgcctcgatgaactttttttgtgtgcctaagtgtacctcaagtacgcctcattgatatcgcctcgcctggcagaaaacgagcttgaccccaatcgccttgctccccaccgcctaggcgtgcctcagtcacactttttaaatacattggtattaagtactcagaatggcaaaaagaaactttgggcattaattagacatttcactttttgtgcaactatttgtgacttcagagattgatatgttttctacattacagacttttgtgatggctgcatggtctccactgtcaaagaacattagtttaagtagaagaaatattgctctattaccttcctccctctacaaacaaaatcctaaaatgtggttatgtagtgccaattcaaacttgtagatgcatgactaatgctttcattatgctgtgggtttttatactatgattcatgtccaattacataacaattagctggagtcaggatatgtcacggaaattttaagcctggcaggatgattgtttatattttctctttttcggtgtttaagtcaaagtaaacttctaggctgctcttttataggctagttgggctgttggggagatctacacattaagtgtgaagaaatcttgtctaactccagtttggttgagaactgtaagctgtcataacatttgttgcatgatgaggccttgtgggattatcatgttagctgtaaactctaaacttacttgaaatctagtgttgtgtctccttatttctgtagtcaaaattgaaccttctgtacgtttttgatacctgcgactagaatgatggaattctgaattactgatactattacaaccatctgctaagaacgaagatgactcttagctaatttctcagcagatttagagaaattaagaagaattactaatgaatatttaaagagaaaactaccaagatatgattgtattgatgaaaaacaccaattacaacctaaccaacattcgagaggttggagctctcccaagtaaccatttctctcactaaacttatcaattttcaagatgccttttccattctcagttcctctatatttatactactccccttagcaaactacccaacttattccccaagtaaactaaagagataatatctaaaatacccttccccctacaataatattagttcttagcattaccggccccctaaacttccaccttgtcctcaaggtgggtcgtaatcatcactaaattctgggcctctactcgtatattcagtgtcttgcagcccttcaggccccaagcctaggttatgcagctcgtgttgcggctcctcctcatatagttctctggctggagtgagtgcctcaactataatgaaaaagtcctggaggtggggaaggaaggagtgtctgaaatggtgtggtgtgctgctggtgttatgggcttgtgcctgaaagttttgggtttaaagagatggagtggagaagagtggagaagtgactggagacgtaaaagaaggaatcataatttttgtaagtggtgggttgaaaaagttggtgggaagaattgtttttataaaatgtagtgtaatggtcgaaaaatgggtggagtaagtatggtttttggctggggatgtggtactgggttgaaaataaataggtctgagcttacttgtaaaattggcctcaacatgagcaggcccaatatcttgagccaattccccaaaagctggcaatagagcactcttaattgcattgttgtgggccatcgggctccaaacatatattcggaggagccggacttctttggtgatgtcattagcttggcccattgcacactttcccttaacagcctcaagatcttttcccacttttgtaccccaaccacgtggcttcaccatcctttctttcttgcttttgtcacttttttggcaatatacgagtttgtccttactaccctcatcttctaatgttggcttcctcaccaagcttaatttctggaattttgtccaccaaatcccaccacccatcgtcaacaccatacctatctacaccggccaagaagcctggtcctccacccgaattttcgccacagacaaagcctgaacaaccgtcagttctctcaccggagaagttcacaggtccaccacctgacccactagttgctgatccacccttcacaaatctccctcctctggctgccacaagtagtggttcctccgtaatactcatatttctcgtccaagagccctggaccaccaccggacccacttccaccggcaccaacttgttcaaatgatacttctctttcttttccaaacagcctacttggactggaaaaaccactgcgattgtagcctccgccagatctgtagcctagtgcacctaacgtgcttccaactgcaacccaatagggatggaaatggatgggattcggggagggtggagcatcacccgcatccgtcacccgcatccattcgctccacccgctccacccgcatccatccatccgtcacccacgggtgaaacgggtgggtcggtgataaacgggtggaaccatttagggggtgtttggtatcatgtttttttacaaaagaaacagaatcaagtaacaaaatccgtttctacttgtttggttctatgttgctcagactcgagtacccatgtccgacacgggtacgtgtccaagtgtccaactcagctattttctagaattttttatattttttaacccaaaacaaagtgtccaagtgtcccacccatgtccgactcccgaggatccgacacgggtacttgaggtgaaatgaagagtccgagcaacggaggtttggttagtgtgtaaagtaacaattaccgttacttgaggaaaacacatccccccaagttgtttccattcaaaaacctaaggaaacaaataacgtttcactcctcaaacaagaggaaagggaatgggttatatttatttccattccattaggataccaaacaactaataagggtaacacttattattatcctttcccctccttatcaaaatcctttccattccgtttacggtattcataccaaacacccccttagtatattttctaatgaaatttgtgatatgatatgcatgatataaaataattctatcaaaaatataaaaagtaagtaaacttacatgtacaacttaatagatgggtgatgggttggaggttaaacgagtgatggatcgggtgacgggtgaagaaattctcacccaccactcgctttccatccatttaaattaggtttttcatccatttaaaaaaccgggttaaacaggtgatgtatgatccatcacccatttccatcctcaaacacatcccgatttgtttactgcaccaccagatccaccagtataaccacccgaaaaatcatcatgccttctactagccttgtaacctgctcccggtgagaagcttcttccacaagtggtggtcgctggacctccatctccttcttccccaaaaaattttccatgacacccactcgacccttcatctgtgacaacctcttcttcgtccacctctgaagttttggggtcgtcttcctcctcaagctcctcttgaagtaactttaacttccgttggatgggagagaacgcttcattgattatcttcaccagatcttcttgaagtttctcgaaactttttctcacgttttcctctacctctttcgtgatttcctttccgatctccttcatttttagactaggagctcttgcgattccatggcagatttctttttttaaaacaagaaaatcaggcacttaatctcccagaatagtggtgctctgataccattttctaagaaccaagatgactcttagctaatttctcagcataacaacaaatttagagaaattaagaagaattactaatgaatatttaaagagaaaactactaagatatgattgtattgatgaaaaacaccgattacaacctaaccaagaggttggagctctcccaagtaaccatttctctcactaaacttatcaattttcaagatgccgtttactactccccttagcaaactacccaacttattccccaataaactaaagagataatatctaaaatacccttccccctacaatattagttcttagcaccatcaaactgggatggatggttttgtaaggttccaatttacttctccatcaaaatattttaggattttttatctcatgtattttagagtttcctcgtccctttttatctgataagattcttctgatgatttgattttatggtaggctccaatcagcaatattaaagaactgaagattctgaaagctggagttccattttcacttgacttcattccagaggtttgtatttttatagtggttagacatgcttcccctagttttcaaagtaaaagcatccttgttgtgacgatattttttcccttgtttttgtttttattattatcatcacttatttccattttctattttccatgctgataagatgttcatcaccataatcttgtggtatcagaagtgtttagtggagtttattcactacacatgcagttgttcttttgccatgaccgccattcattttctcgtcaaaacaaatctatgaagtttggttttcagactcatggttcttgtagctcttgtgaatttttttttcttctccttgcatgcattcttcaaattacatattgcatataccaggtgctctcctttattttatatttaatttttaaaattctatcatatattttttaatgtcaaacctcaaactaggggttcactgcatcttaggcttaccaggctaatatttctttacttaaccttttccctttatatttgctatcctcttgtgtagtaatcaccataagaagggtacaaactaaattaccctcccattcttttgtatcattctgaaatagtgtcacagagctttgatttttttgccctcatttaatctggcaaatgttctctctatttttttttttttactttcttttgacgggattctcaggcaattgttacggggagcagccagtcacactgtttctgtttattatgcaggtgagttacctgcccctctctgttatgattactgcgtttaagaagaccagcgttacaagacctcttgagggcttcggagttcttatcccttcgaatgagcaacataatggactgaagactctcggtaattgtctggttcacgtgtgtagcgaatcagattttcaaaccctgatttcgtaacattgcaggtactctgttttcatctatgatgtttccagatcgtgctttctccgatatgtatctctatactacctttgttggaggaagcagaaatagagaacttgcaaaagcttcaacgtatgagatatgcaatgttttaaatgtatgctatagtcatcgtttcaaccttttggtgcctttttcttactaatttatcctcctggtttaatgatcttagggatgaattggagcaaatagtttcgtctgatctccaccagctgttgggcactgagggaaaacctacttttgtgaagtattgatatctttcacccaacttaacatgatttgtgcttataatatgttaaataaagtaactgaaatcctgaaattaagactacgaaactgtatggtgacagtcatttttactggaacaatgcattccctttatatgggcacaattacgactcagttctgagagcaatagaaaagatggaaagagatcttcctggacttttttacgcaggtaatctgtcatttgcttgttgcgataaagttcatgtacagttggcatatcaatcaacttgcattctttcttgctaactccaaacaatcaggatcattaacttgtaggctgcagcaacagagagtatctcccaagttgttaggtttcatgtaacctcgtcgctgagatgaaatttccgttggctaaaaagtgaaagttttgtattgatgttacccaaaacaaaagtattttgcatgttgcttgaagttttggttgtttcagatagtacatcctttgacatgaaaataaatggaaaagcgtatgtcaagcaattatcatctagtttctttgtttctagatactagccgcatttgatcccagatcatttttgaggaagtcagctgaaataccgtagctatccttcagttttcataataaaactttaatggatctgatgtacagtaatttagtgtgcaccgggttaataattgatattaacttcatatagtgagtcttataaagatataatgaacttatatacaatatagtggattttattaatggaaaacatatagtgaaactatatgcaatatagtatgatacataaagacttagacaacaagagcattcgaaattacaaagaacaaaggaaagaacaattgtatcaaaccggttcgaatgaacaaacaaccaccacttccacaatcaatgtaccaccaatcaagactaaactataacaatgagcttctagtttaagtctactttgagttttaatcaccaattcaacgattagatgatcaaaattgcaaaggttaagagttggtcaaacctaaccaagagttacactaggcacatagctttgttaggagtatattagtttatgaattctagttaagttagaaatccaatacctagttggattaggattcctaattggattagaattatagtttagttagaattctagtaatagtaggcgtgtgattaggagatataattagcttaattcttatattgttagtttaattcttatcctcgttttaggtttatctttagtcgaacttgtaccctatataaggggcctttatttcattaataatatagtttattttgagtttaaacctttacttgtgattgtttgcttgagaggttattaatcgaaccattaataacttttcaggattgttaagtttttagtgttaaacatcttaatttcaggagtgattttaagagtgtttagattcttgtattcaagtttcaggactgatcttgaatcaagaaatatccctagtttcgactaatatcataagtagttcgaattcttggagtcttttcttcaagattcatattcataacttgattatttagacttcttggttttgtaatcatatcaagtggtatcagttttccagggaggagaggatacaaagggttctctttgatcaaagaagatccaagggcatcaataagaatgacacttgcaataagttcgagtgatacaaacaacttcaagactcgatcttttgctaccaagaaccaatcttgacgcctgaagattgttaggacaaaggataagaagtgtttctacatccaagattgcattctttacgtccaagattgcgtcaagatccattctttaagttcaagaaaggagtagaaagcattcgaacactacttaaacatgacatccgagatggataagctggctatggccatgagtgccttggcacaatcacaaactgagtcacgcaaccacatgggtaggatggaggcacgtgaccgtggattgaaactagatgactatagtggagatggcaatccagaagacttgttggagtggatttgccaactaggcaaagtgagtgattataggggctttgatcacaagaagagattcaaggttgcttccattaggctcacgaagtatgctggaatacggctcgaaggattgcatgcacaaacttcttgcctaatgactatgaacaaaaacagttcataaggctcgcatcaataagccaaaacacacttagtgtacacgaatacagcatggagtttgacaaattagggcttatatgtgacatagaagagaaagagcaatacaagattgcaatgtacattaaagggttgaatcgatatatagccaagaagatcgaagtctcaacttatcacttctttgaggatgtgactaaattggctaagaaattcgaagagcatgacaaagaagaagggcctaagagttcttacacacctaagtatgactctagtgctaaagggaaatcaacagttccctactcaaggtggtcggaaagacctaagaaccccactacacctaaggaggacactagcatggagaagacaaaagtggccgtacctaaggagagtttaattttgtgttttatacatctttgcttaagagcttaacaattgaaactattaataacttttcaggatggttaagtttttagtgttaaacatcttaatttcaggagtgattttaagagtatttagattcttgtattcaagtttcaggagtgatcttgaatcaagaaatatccccttgttcaactattataattgatcttattcgagttcttggagttaatttcttcaagattcatattcatacttgattattagacttcttggtttagtaatcatatcaatatcattagcattaatttacccccagggagattaagaaaggattagcctaatcaaggcgcttaagaagtttttaggaaaaatcgtgcttgttaagcttaagaattgaacttctttcaccatttgcccttgattctcttgttgaactagaagatcttggttcatagtagatgctcctgcatcatagtagagcatttaattttaattttttaacatgcacgaagatgtaggtagtgtagtatatatcgtgagacgtggtttaacatatagaaagatgtagtttctgcatgatatagtgagtttttgcatgatatagtgaatgtctgaatgatacagtggatcgttccgaattgttgtagtttgtatgatatagtatttttgtgaatgatatagtgagtttcttcatgatacaatgggtttctgaatgatatagtggattgcttagaaatgatatagtgagcttttgtatcatgtagtaggtttctatgtgatataggttgttaaaagatgatacatgcttttggcctcatgtactctaatgttaacgtgaacccggtccttgcaagtcaattgcagttttttcaatattaagctatttttttttttttttttttttttttttttttttttttgtacgggaatatttagcatctttaccacaaacataaccatacgaatattatgcggaaattccagtctgaagtcttaacttttcaaaattaaaagcttctatattatttttggaatgaaaaaaaatgagctatggcatgttattttgaaatacaatgagtctcaaggtgcatagtggcttcaattctacgaataatgaatggactactgatttctaattttttgttccgggcttttgcattaggtaaccataaagatggactctctgtgggaagaactatttcctctggatacaaagctgcggagcttgtgatatcctatctcaactctacttaagatgcctaaatgatcgaggagactccgtaagtcctttctctgattctatctttgaactgagtggaaacacgactgtggtctaaagtagttgatgtctcagatatccagaaatggcgttagtgatattcaggagctgtccattgaccctttgattcattgttgcagtttactgaaagttgttagctggtctcagaaaaacgaaaggaaaaaagggggaaaacaaaaacaaagaaacgtagattgtggtgttaaaatcaagaattccagagatttgtaccttctttatcagttgaattgtttacagtgtgaatcaagaagttagctcgaccttcttttcttgtgaatggtaagatttcgtgatcatcaatacttgattgtgctgtttgcaacttcaacggtaagatttcctgatcttacagtttaattgcttgtgctgtttgccactt

SEQ ID NO: 45 - DNA, 1575 bp, synthetic construct
  misc_feature 1..1575: note = R126L mutated Beta vulgaris PPO2
  source 1..1575: mol_type = other DNA
atggtaatgctatacgattctcacctctcaggagtctcaactcatcttcaactatcgcaggcatttcccaggaagaacccattaatggccaaagtgtctgagccgggtaaacccacttctgctaaaaggattgctgttgttggtgctggtgttagtggacttgctgccgcatataagctaaagtcccatggcttgagtgtgacattgtttgaagctgatactagagctggaggaaaactcaaaactgttgcaaaggatggtttgatttgggatgagggggcaaatactatgatagagagtgaagcggaggtcacgagtttactcgatgatcttgggcttcgtgagaagcagcagtttccaattgcacaaaacaaattrtacattgcgagagacggtcgtcctgtgctgataccttcgagtcccattgcacttctcaagagcaatatcctttcagcgcaatctaagctacaacttatgttggagccattcctttggagaaaacgctatgcttctaagatttctgatgagcatgctcaggaaagtgtgggtgagttttttgagcgacattttgggaaagagtttgttgattatctaattgatccttttgtcgcgggtacaagtggaggagatcctcagtctctttctatgcgtcatgcatttccagaagtatggaatattgagaacaagtttggctcactaatttccggattaattcaatctaaactgtctccaaagaaggaaaagggtggaggaggaaagccttcttctaatgaaaagacacgcatacgtggttcgttttctttccagggtggaatgcagacacttgttgacacaatatgcaatcagtttggtaaagatgaactcaaactacagtgcaaggtcctttcattgtcctacagtcataaggggatcccttcttcagaaaattgggtcgtgtcttctgtgtcaaaaaattccattgaagatcaacaatatgatgctgtcatcgttaccgctccaatcagcaatattaaagaactgaagattctgaaagctggagttccattttcacttgacttcattccagaggtgagttacctgcccctctctgttatgattactgcgtttaagaagaccagcgttacaagacctcttgagggcttcggagttcttatcccttcgaatgagcaacataatggactgaagactctcggtactctgttttcatctatgatgtttccagatcgtgctttctccgatatgtatctctatactacctttgttggaggaagcagaaatagagaacttgcaaaagcttcaacggatgaattggagcaaatagtttcgtctgatctccaccagctgttgggcactgagggaaaacctacttttgtgaatcatttttactggaacaatgcattccctttatatgggcacaattacgactcagttctgagagcaatagaaaagatggaaagagatcttcctggacttttttacgcaggtaaccataaagatggactctctgtgggaagaactatttcctctggatacaaagctgcggagcttgtgatatcctatctcaactctacttaa

SEQ ID NO: 46 - DNA, 37009 bp, synthetic construct
  misc_feature 1..37009: note = F420L mutated Beta vulgaris PPO2
  source 1..37009: mol_type = other DNA
tattccatcgaatgtagcaaattgactgtccgttgcaatttcggagtttccactcgtcgcatggtaaatggtaatgctatacgattctcacctctcaggagtctcaactcatcttcaactatcgcaggcatttcccaggaagaacccattaatggccaaagtgtctgagccgggtaaacccagtaagtcaaacattcgaatcacaactcaagcaaatttgtcttgtttgcgttatattttgctcatttcagccttttttgtttttccgacctttgcatactgaatattgtgtgtgtgtgtgtgtggggtttcagcttctgctaaaaggattgctgttgttggtgctggtgttaggtaaattttcgtctcttgcagagtttttgagtcatttgggaattctatgtgaaacttgtaactcccttcagtccaacgaacgcagtacaattttctatcaaatcatggtcctaatttccaattttccatatatattgttggaattatattgggattgtctatcactattaatagtattaggatcaattgtagagaagcacagaaatttttgggatcgaaagaatatctggattgccacattaacagcagatataattcttccaattggtttttggttcttcctaccttgacttgtctggtcaaacattataaactttaacctttaatatccattaaagtaaactataggatttttttgtctaaaacatgcttatataacatgaaatttgtgagaaaccaccttatatatatttttttgcgaaaacaaaccttaaacaaaattattatcgtgagaacaaaccttatgccaatttcgatcattgacccaaggttttggcattgaccgtgtcatgaattttgttgggtttaaaaagtcatgtgtcttgcatacgaaatggtaaatgcgggaaccttgggtcaatgtttggaatccgcataaggtttgttctcccaaaaaatgtttttgttcaaggtttgtttttgcaaaaaaacttatataaggtgctttctcagaaatttcatgttttataaagtagtatttgacaaaaaaccctaaaatatattatagaattattattgactaaattgtgtaaaaatgtactcttctaaaagtacattatagtattttagtggaacatttgcgagaaactactttataaatacgatttttgcgagaaatttcctaataaaaaaatgtgaagtgcaaaactatcttattgataattttctactccctcaaatccaaaatactatgaagtctttcctttctggtttgtcccagattagtttgtacgcttccatctttggtatgatcccacttttattatacttattagttttacgtgagttccttactctatctcttttaacaaaaatactcaactatctctatccaataaaaagttccttactagtcctatcacatctgctttttaataaaataacgtttgataaccacacaacttatatccttaaaatacacgttcaaccaagtgttgagattaatttggacggagggaataaatattttttgaggcatattggtagcagtattcggattccgataggttgactatgtttccaatgttgaccaacacttgccttgcatgtaattctaactttgctcttttttattcttcatttccctcgtattccatatacaatgtttagagacccattccttcctcttctcttctttcccttccttactatgctttgccataatcttcctcaaatgagtgcaaattaatttgtcgttgatgtaggccaactgattgtagcacatcttcatagttcatacctcaacacactcgtaattatattataccctacatgttaaatggctcatgaagctttattttatatcatacttcctccgtttcacaataagtgtaacacttttcttatttggaataatcacaataagtgaaaccaagctccaaatggtaagaaaagttcactcttattacaaatataccaccaaaaagtaagaggggatcacaacttcaatacttcttcactctactttattgtggtcccaactttctctctctaaattccttggtaactccccactttctctatgtttcacttatggtgaaatggaggaagtattttgtagtggtatttagctactaggccttggatgatatacaatcatacaatgtatttatattcacgataatttgctgcccaccttgattaccatgatttccaccaattttatcaatttcagtacttcaccaccccgaatttatattttttatttccaaccttggtatctccatttgtctgagtgcccgatccatttgtatcgcctccagaattgaagaagcttcctgcagctagacaattaggaaggttaaaaaagtttggagatggtggaggatagccataataatcattgttgggaggtggaacttggaaggttattgtagggttgaagtccttgatgaagaagaattgagttcaaatgagaggaaaaaggagcagggaagagggacaataagaaaaaaaagggtaaactaaaatcacgtgtaaggcatgtgcagatcaacatcagaaagcatagtcaacctactggtattagggcactgatacctttttgggtcaaaatttttttacaaggtatttcatgaggtagttttgtccatttttttttttacaaggtatcgtctcattttttttttatcatttagtttctcgcaataagtgtatttcatgaggtagttttttccaaaatttcctcatttattataaaatacctcatcttttccataaataatgcaatgtctagacttttacgctgtttacacatgctcctttgaccatctattgacacacaaggaaaaatagagtagagtcatgcaggatcttgttagatttttctcgatatatactttcaaaagatcaatttttttataattttttttttgaggggattttttttttataattatgtacttatcaaaggtcaaagttgtgcaccgggaagcataaaactctatgtgttgcaatttacatggaaggggaggagtataataagagaaaattatggtaaaaggttcattcctggagatcatgagaaaggaagtagaaagaacaaaaaagaacaatgggagtgcttttcaatgtttgttgtacgtagcatttattcatttgctataatgttttgtgacattgtagtggacttgctgccgcatataagctaaagtcccatggcttgagtgtgacattgtttgaagctgatactagagctggaggaaaactcaaaactgttgcaaaggatggtttgatttgggatgagggggcaaatactatggtaatgtttttgattattgcaggtcttgcactttagcgcacaattaatttctggatttttttttgtactgtggtggttatggtcatcaacatgtctcacccactgtgcttgcagatagagagtgaagcggaggtcacgagtttactcgatgatcttgggcttcgtgagaagcagcagtttgtaagtctttcattatctgaatggcacatactttatttcgaaagattgtaattgccttttctttctagatggcttcatcttcatgttgctttctgattcagtttcgtggctaactttccaagtttgtctgattgctaactctgtcatagccaattgcacaaaacaaaagatacattgcgagagacggtcgtcctgtgctggtaagtttgcttgttttacttttgacctcttttaagatctttcaactctggagcctggaaacatggtgatgcaggaggcaagttctctctattttacatcctttcttctctgtatcttatgacatttgcctcttattctgtgcagataccttcgagtcccattgcacttctcaagagcaatatcctttcagcgcaatctaaggtcgttttatgttaagacatacttgatgctgagagtttattgaattcttaaccttcttcttattttttttttatttttttagcaaaaggtaagtatattgcatttaccaaaaaacagtatgtacaccaccacagcagccatgtcagaatctagaaataccaccgaaaaaatcctacacccaaccagagacagttatattatatcctactcctaagtttctgtacccaatttacatcaatattggtccatttacaagatatttttataattcacagaagcacatcagttttaattagtttaataatgacctctggatgaataaccaactcagaccatatagccttattcctggctttccggaagttgtacgccagagcagcaagcacagcaatgcaaacctgtttcttatacctccttttatgtgtcttagcccatctcttatagctagtgaagatacagtcgtgtgcacaggattgaaccccaatccaactagcgaaagcctcacaacattatgactataaatacatctgaagtataaatgctgcacctttttctcctcttgcctgcacggtatcagaacaaatcccagctttagctaacaattccctggttttcagtttattcaatgccatcatgcaagcaatgaaagaatgttttggaacattcagtttgttccaaacacagtgagagcaagggacctttcctgcagttccacttagccacttatatccctgactaatagtatgactctttgcaccgtaaattgatttcaacttaactttttcataagcagtgaattgtgtgttgttagagtgtctagctgtctaggagattgggagaaaaggagggaccaaggagatagaaacacacctttgtgtttctttgtgtatttactttttagggtgggtcacgttttctgagaaatttgggaaaaggaagaaatagtaacacactttcccatttgtataacctgtatactggagctccaatataatttgcatttttttttgagctgcaagaatatgttgacaaacagttattgcttcttcctcagctacaacttatgttggagccattcctttggagaaaacgctatgcttctaagatttctgatgagcatgctcaggaaaggtaatgtcaagacatgtgttacctcgccttaattttcgttccaggaggtgagcatgcatttagaactaaaaggcacaaagactgttggtggtcttgcctgttcaaatataatggagaggagttttcgctacatttaccctctcttgaagtggggttgaaatatagcatcaagttgaatgcttgattaagtttaaaggacttgtgtaactctttttctgtttactgtgattacatgacctggttgattaacataatggtctgtttatctgtagtgtgggtgagttttttgagcgacattttgggaaagaggtaatggtttaccatagtatttctgctttagtggtaaattgtaatgttgctgataattatacttcgctgcagtttgttgattatctaattgatccttttgtcgcgggtacaagtggaggagatcctcagtctctttctgtaagtgaacattttgtgcttcactcccaattttttggaggctggaaatagattcttttccagttgttctgtcaaaaatagatgtagctttattttgaatttgaagttcccaattgttcattttgactattactgattattgctaagagtggcattatgctattatgctcctaaaagaaaggtgaattttgacctacatatagtataatgtatcaatattggtttaattgtttgttcttttgttccttttggtgctcatcttgcgccttgttctcatcgctcgttttttcatgttgcacttgatttaaatttgctcagcttaacttgtctttttgaatttatattacttattgctatattttactaatttcgttgaaactaattttttgctgaacttttcgttttgttgaaatcatttttctgaattaacttgattttcctgaatagaattgaattttggtgatcttaccttttctgcagccttttatttctttcttgtcctttttccaatctcatttttttatatttccattgtgttgacatcttatcattaactgtgcagatgcgtcatgcatttccagaagtatggaatattgagaacaagtatggaccataagacgtttattttaatcgacatgtatgtttcttagtttatacatatattaattctgtggtaaaaaaaccgaacaagaatatctttttttttttctatcatcaaaaagggtgaatatatgtagaggaaaaagatttgaatcaagatattagcctaaagcaataataatgttagtaatagctttaataacaaattcaaaacgtacattaatgaaccgagaggccggaaaatagttaaagtgaccactaagagaagcgaaggattcatgatgggttttcaacccagtagggcaaatttgttcaatgttctttacaaatcaagcttattaccttgtgggtgtttttgctagagatgaatgatagaattttccctagttggaagtcttttttggttactttatgggagctagtgatgtaatttgtttcgccttatggcatttcctaacatgtgcttttgtgatgtattgaagctttttttttgccttaatttatgctggattttaattttgttctttgtttcatttttcttgcttttgaaaaaaatatatagatatgtatatattaggattggtcgaggattttgagggaagggaaagacctaagaaaacttggatgagggtgattgatagtgatatgagtctatttgggatcgaagaaaatattcctttggataaggtgtagtggagggttgagggagcaaatttatgcagattagcttgacttaaagtttttctttttgattatttttcatttacttgtgttttgcaaacatttactcatgaatgatgtaaacttcttcaaccaaatctctggaaaaaaataatctacatggaaaaaacattattaatgttaacttgacagagatcccatccttgtgaagcagctagcaattaggcatctaacaattgacattttaatggacaggatagaatgtctcttgatagtcaataccctctgtttcattgtatcccatagctactaatctagtttgtatctttccaaagaaccattattttgaagtttcaccttgaacacccattttgaaccaatatgtttcttgcccttggggagaggggctaattgccatgttttgatgcggatgcaaagacacttgttctacctgagcctattgacttgatcatggatactctagggtttgaactcaagggaaagaatcaagtcttggcatgtgtggtgacatggcgtggggatggagtaaagaagagtcatagttctgttaggatatgttcttgcttgctacatagaatcgtagttctgttaggattgctatgatattatatctagtagatagattttatagttaattaggataaacatgtgatgatcatgttataataggcatgtgattagaggataggattagcttaattcttatcttgttgttagtttaattcttatcctagttttatgtttatcttagtcgaagttgtagccatataaagggcgttccattcattaataatacttagttttgctttgtgttttaaacatacttcttgattattgtttgcttgtgagctaactaatcaaaccattaaagacttttcaggagttttagtgctaaacatcttaatttcaggagtgattttaagagcgtttagtgatcttgaatcaagaaatatccttgttcttgttcgactaatatcagtggttttgttcgagttcttggagttaatctcttcaagattcttattcaacttgattgttgagcttattggtttagtaatcatatcaagtggtatcagttttccagggaggagaggatagataggattctctttgatcaacaaagatccaagggctatcaacaaggttcaaacattgctgcttgttcaagacttgatctttttctaccaagatgcattctttacgtcacaaggtagtaataacaagattaagagtggtttttacatccaagaatcaatctttcacgtccaagatttcatctttcacgtctaagattcattctttaagatcaagaaagttataacaagcatagaagaacacataaccatggagtccgagatggacaagcttgccaaagctatgcaagcacttgcaaagtcgcaaactgaatcacagagtcgactcaatgagaatactaccacaatcaatgggattggtagtaacatgaataggttggaggcacgcatggatgccattgcaaccatcatacaaaagaagcttgatcggaatagtgccaacttcataggtgccaattcagaggaagagttggcagaacgtgaagaaagatcatccaagactacatacaatgatgatcgtggcttaaagttggatgactataatggagatagcaatcgagaagacttgttacagtggattcgacaacttgagaaggtatgtgattatagaggctttgatgacaagaaaagattcaggattgcctccataagactcacgaaatatgctggaatttggcttgaaagcttcaaggcacaacgagccaagaaaggtaaagaaaagttgtgtagttggacaaagttgaaagttcaagcttaaagagaagttcttgcctagtgactatgaacaaaaatagttcataagactctctactataagccaagacacgcttagtgtacatgagtacaccatggaatttgacaagctagggcttatatttgacatagaggagaaagaacaatggaagattgcaagatacatcaaaggcttgaaccgccacattgccaagaaggtggaagtatccacttatcacacctttgaggatgtgacaaagttggctaagaagtttgaagaacatgagaaggaagagaagcctaagagttcttacacgcctaagtatgatactaatgctaaggccaaggctagcttcctactcaaagtggtatgaaggacctaagaggctaagaacctcaccccacctaaagaagacacaagagttgagaagcctaaagtcgtcgttccaaaggagaaatttgaagagatgagaaagtgcttcaagtgtcaaggaaggagacacatagcaagcaattgtcctaacaaaagagtcctcaccatgagacaatacctagctttgcaagaagaggaggatgtctattagttcgtccctgatgaagagcaaacttaggggaagaagaggaggaggatgcttttgctgaggatgatgcaaggctagtaggggtcaagaggcgcaccttacatgtcgaccatacacctagcatggagcaaatggaaaaatcttttccacactagatgcaaggtaggtgactatatatgtaatggtataatagatagtggttcttgcactaatgttattgtatctgaggtagtgtcaaagctaaacttagctacaagggcacaccctaagccatacaagttgagtttgctagatgatagcactggcatgagagtaaagaaacaagctttgatttcattctctataggggttataaggatgagttatggggtgatgtattgcctatgagtgcatgtcatctcttgcttggaagaccattgcagtttgataaaaaggtcatccatgagggggactctaatgtgtactctgtgttggttggttctaagagggtatgtttgcatcccttagctcctcattcagtggcgccaaagcaaccacctaagacaccaagttactttctatcttcaagggagttcgaacaagaggtggaggaagaaggttgtgcttatgccttgattgtaagacatgctgccacaagtgtcaagactactagcaatgagaagctcgaagccttgatgaaagagtttgaggatgtctttctagaggaactacgacccttgagaggcatagaacatgctgtagaccttgtacctggcgcccctttgcctaacaagcctgcttataagtgtgatccagtggcatctagggaattgcaacgccaaattgaggacctaattgaaaagggctatttaagggagatcatgagtccatgtgttgtgccagctttactagttcctaagaaagatgacacatggaggatgtgcatagatagtagagcagtgaacaacattacagtcaagtaaaggtttcctatgcctagattggaagatatgttggataagttacatggggcatcaatcttttctaagattgatcttcgaagtggctaccaccaaatgaggatcagagaaggtgatgagtggaaaacaacattcaagaccaagcagggattgtatgagtggatggtgatgccatttgccttatgcaatgcgccaagctctttcatgagcttgatgaatgaggtacttcgtccgttccttaacaagtttgtggttgtttacatagatgatatacatatctatagccaaaatgtggaggaacacttgttgaacttgcgtagcttattcatgaagcttagagagcaccaactctatggtaagattgatggcgacgaggttgacgggggattatggcggcagtgaatcaccctctttgccggtcactgaaatacaacctgaggtatctttaaattctgtaattggattgactaacccaaaaactatgaaattgctgggaaaaattgctggatgtgaagttgtggtgatgattgaccctggggcaacccataattttttatcactagctactgttgagaaattagctattcctgtgtcggaatcggaaggatttggggtttctctaggggatggacaggcggtgaggggtagtggaatttgtagaggggtgttattgagtttaaatggtggagttgaagtggaaacagattttcagcctctgggtcttggtaattcggacgtgattttgggtgtacagtggctggagacgttggggacagtggagagcaattggaaaacacaaacaatggggtttgaaatcgagggtgtcaagttcactttgaaggtgacccatcactggcgaggtctcgaatctcactcaaagccatgatacgtaccttatgtaaagagggtggaggtttgtggcttgagttgaaccagattgagcattatcaggagaaaacaccgcattcatcagccttacctgaaattccagttttcttacagagagtccttacccaatttcagtctgtgtttgctacaccagaaggcttaccaccgataagagaacatgaacatgcaatagttcttagagaagggtgtaatccggtaggggtaataccgtaccgttatccacagttccaaaaagatgagatagagcgcctcatcaaagaaatgttggcttccggaatcatcaatccttccacgagccctttctcgagcccggtgatattagtgaagaagaaagatgggtcgtggcggttttgtgtagactatcgggccctcaataaagaaacggtccccgataagtatcccattcccgtgattgatgaattgttggatgagcttcatggggcaacacttttttcaaaactcgacttaagggccgggtatcaccagatccgggttaaggccgaagacactctcaaaacagcttttcgcactcatgaggggcattacgagtttttagtaatgccatttgggttgacaaacgcgccggcaacgtttcaatcccttatgaacgaggtcttcaaaccattcttgcgcaagtttgtcttggtatttttcgacgatatattggtctacagtagttctgccaggaacatgaggagcatttgaccttggtgttgcacaccctagcagctcataaattgtttgtgaatcagaagaaatgtgattttggcaggtcggaagtagcatatatggggcatatcatctctggtcaaggggtggctgtggatatggagaaggttcaagcgatggtggaatggccccttcctaaaaacctccgggaattacggggatttttgggccttacagggtactaccgcaaattcgtacttcactatgctcatatagccaagcctttaactgatcaactcaagagagatgcgtttgggtggtctgaggcagcaactcaagcctttgaaaagctcaagaaggcgatgatcacatcccctgttttggcaatgccggacttccaagagttgtttgtggttgagaccgacgcatccgggtatggtctgggggcagtgttaatgcaaaacaaccgacccattgccttttacagtaagttgttaggtgcccgggctcaattaaagtcgatctacgaaatggagttgatggccatctgcatggcagttcagaattggagatattatctgctgggtcgacatttcctcattcgtacagaccaacagagtttacgtcatctcactcagcagcgagaagtaagtactgccttccaacgttggatgagtaaacttatggggttcgattttgaaatacagtttaagccggggtgtgccaaccgggtagctgatgcattatcccgcaagacagtgggagaggttgaattgggtgcgctgatattaactcatggggtggactggaccgacttggagcgtgaaattgaaggcgatcctctgttgtgcaaaattaaacaagacttccacgggggtgctattactcctgtgcacttttctttggtggacaacaagctgttgttcaagggtcgatacgtgattcccagctcttcggtttttattcctaccttgctgcgagaatatcacgattctcccattggagggcattcgggggacctcaaaacatatctcaggatggctgccgactggtattggaggggcatgcgcaaggatgtggcgcggtatgtgcaacattgtagcgtgtgtcaacaacaaaaaatgtctcaacagatgccagggggggtactacaaccactccccataccttcctcggtttgggatgacttgtcaatggacttcgtggaaggcttgccatcttccaagggggtaaacaccatcctcgtggtggtcgatcgtttgtctaagtacgcccacttcctcccactacgtcatccatttactgctgtgtcggtggcaaatgtgtttgtcaaagaggtggttcgtttgcatgggtttccttcctccattgtttcagatcgggatcgaatttttatgagtgtgttttggcgggaattatttcgtttacatgacaccacactcaaacgaagtaccgcgtatcatcctcaaacggatggtcagtccgaaatcgtcaatcgagctctggagacttatttgcgttgctttgtgggggaatacccgcgctcttgggctcagtggcttgggccgaattttcatataatacttctcctcatctctctaccaaaatgaccccgtcaaggtcctttatggtagagaccctcctactgtgatacgggttaatcggggagcctcacctgttgaaagcttggaaaacatgctccaagagcgagacgcagtattagatgccttgcagattaatctgattaaagctcaacagaaaatgaagagtagtgctgatgctacaagaagagaggtgcattttaaggtgggagatcgagtgtacttaaaattacagccttaccgtcagaaatctttggcttaacgcccttatgagaagttagccgcccgtttctacggaccatttactattttacagaagattgggcaagctgcatacaagttacaacttcctgtttctagcaaggtgcatccggtgtttcatgtctcccaactgaaacaggccgttggttccattcccgtttcagccactattccagagcaattgtcttctgacttggagttagaggtggaacctgatgaactcctcgatgttcgtagtgtttctagaggccagcacacttacttggaagctctcattcagtggcagggattaccatcattcgaagctacctgggaagatgtggctgctttccatcaccattttccatccttccaccttgaggacaaggtgaaactttgggggggtggtaatgtgatgcaccaaactaccactccactactcacctattagaggcgtaagaaaaagggggtaaatcaggaatagtttacaaattctgttgaaaggaatattttgtaattatgatgtcagaggttgttagcaaaaaggcagtagagtaacaataaaaaggggaagggaggagagaagaaggtattgagatttttgtaaggaacttggcccttgggagagttgggagcctctcgaaagctcaccattatcttgtgaatattttccttcctggttatatacaagaaccttcctctgtcaatttcttttctctctaatcttatttcttattctgttttctggttgccattgtttgaagttgcttgttgtgcttgagtaaatacgtgaagtggtgaaacccatctgaattcatcacatctattccaagtggtataatacaagcttgtaatccaaatctaatgagaaatctaagttatgaagaatttcaaaagaactaagtacccttgttttggatgcccaaggatttacttgccgctcaagttaatgctcaacgtgcaagatacaacctctttagtatcccaaggtagtttccataagaattaattgagctcaaatcaagaacaatatttttatgtattaatgtgaacacttcctgaattatattagatatatggtctgaaggttggaagaaagattagcttttaattttaagtttgagatagtttttagaatcgaggaaagattagctcttaacttgtaaactaaggattgctttataagtaaaacattagttatggaactcttaaaattggttttgaacatttctagttaaaaatcccatgtaattctcccaaactagcttaaaatctcacatttcacaagctaaggagagacaaatggcgttctcttgtgaaacaatctaaaattttcattaggctactgttttcaagtatttatatgttagaagtgccgcatataggtacataaaataagtttacaaacacaagtaggaataaggaaaactaaaagagaaacttcagccatacaaaaccggctgaaatcagctactactttctactttctagcttcaaaatctgattgcaagtctcctttaagccaatcaccaatgaaaacctttcctccacatgaagtgtgctcaaatcaagagaagaaacccatcattcgcctatagctacctgggtcagatgaagatacggcaaaaaaaacgctggaaatcagtgaaccaaaataagcaccaattggatgctttctgtccttgctacattttcttctcataggactacttcaagccatacatgaataagcagttagatccagctcctagcatccatttgatcgtacaaatgagctccaaaaagataagtaaaaccaagcagccaaaacctaattaatactaatgatgaattagttgaatagctaatgacgatgaagcaacactttagtaggaatagtgttaattatgatcaatgctacttaatcttctgattaatttttggaaaaatgtcatatctaccttctgtatacacttattcataactatatcgtattattattatttttaaataactaccttttaagtaccaaaacctaagaaatcaggcacttgatggattccatccaaagatccatttggcggggcccactaactgacttttgattttttgcctttcctcttttggttaatctcaatggttcatcaataacaactcaatcttctccccatttcatcaaatcatccctaaatcagaactttttcaaattcacccaaatgaggttatggaaacctctaccaagtttattcgaccacttttagtctagctcaaagttttacacttgcttcaaaaactaagatttattaactttagaaattaggtttttatttttattttttatttaactttgtaacaatcttaaataactcaggtgctttctagagtttggctttaattgtttttcccttggttatgtgaaagaagtatgactactttctccaagactaaagtagagagcaaaaaatgcaattctggaatttcttgcaaaagaaaaggaacgagttaatgataatgaaaaacaaagaaaatgatgagaagagaggagctgaatcaatcatgatcatgtattttaaagttttttttgctattgaagtgacttaagaagaggaaagaggatgagtgaagacaaacaaaagaaaggataaatagagggaaatcttgggcttagaaaggtgaaaaggtaagaagatgagttagtgggccccaacaaatgtatctttggatataatccgtcatgccactgtttggggcttgcttaagtccatacattacttcactaattttacaaaatttattttcttgaccaagaactgaaaaaaccttcagtggtgatctattaggttttggaagttaaaaggtagttatttaaatgtttttaatataaaaggtagttatttagatatttttaatataaaaggtagttatgtgaataaaagtgtatataaaatgtaattttttgacatttttgccttagtttttcttgctaattcaccttttcaacttgaccaagttgctatgaggagaaaacgagcaattattaagcaaatcgcaacactagcattaatccatggcccatgaaactctccataattagagattggattagcacttagtagaacttcttgctcctgctccaggtttccattacttctttatctaagtgcatcaaaaggttgttgggttatgaaaggtggtggttgtgtatagtcattgtcaaaatgttgttaatgcactctatttagaggatgagggattgaatagttttcacctcgtgacctttcattcctttttaaaaaaattgataatgtgtattggtcctatgactgtatgaatggtaataagctatctcatgagctgttactatcttcctcagagtctaggtagaagggtttgggctgataattttctactatgtgcaattagtttgttggatttggatatgctagttgatataggtcctttcccttgggccttctcttaatataggcctacagtgtgattgaagataaatcttctggagaatataagaacaatgagatggattggttagaggttgatttgttcttttggtgtaagactatttcgggttctctattggttatgttcagacgccagaatatgtgttggtgattgttttccatgaacatactttatccgcagagacatttttcttttttcttcctataagattatatttgtttcctctcttggtgctcatctcagtgtctctactttacgttaaactgttgacattacttgacaatgcgtatatttgtcgcatggtgctcttccctcactccacgtcgaccccatacatcaaaaaatgccattaaagaatattcgaactcacaaccttgtgttgaaagaatggaatccctaccaatgactcattaattcattttctctttaagaaataaatgatttcctcacaaacttttaggctttaagagcccaaaagataaaaacataaaataagatagacatcaacgtcaagattagccttaaatgcacaaagcacatgtcaaatgattgataactactcacgagttgcaactctttgggcgttgcctaatattaattggatctcttttaaaaattgttggtggttatggttggtggagaggaccatgtaacttttagctggtcacaactggtaatgattgtcacttttactgcccataaaaaaatttaaactgttgaatatgtttctggcagtggatctgacaaatcctttacaagttggcgtccattttgttttgccatgtgactcaattataatacgtgagttttattatccaccaggtttggctcactaatttccggattaattcaatctaaactgtctccaaagaaggaaaagggtggaggaggaaagccttcttctaatgaaaagacacgcatacgtggttcgttttctttccagggtggaatgcaggtattagcatgtagctttcattctgttaacatttgtggttcttccagacatacatccaatgctttttttttttcttgctataaccataaacattcttgtcatgaacattctttaatactgttgctgagcttagtgtattcgttcattcatgtaatttcctctcttgaggttaaaatggcatacagccttacaacctatatccataatgctccttagagtagaatccctaggttataacatagtaccacttatcaaaataaacatggcacacactgcaggacaagaagtaaatccacctagagaactgagcacctagtagtaaaagcagcgatacattactaataacagtagcagggccataagagtagtaaatgggcctcatttcaacactccccccgtaatggtgagagagaagaagcagtctgaactcccagcttggagagcaaaatagagtgttgctgaacagggagaaccttagtgaaaacatctggcacttgatcttgagatggaacataggtaggctgaataaccccttcttcatttgtattgtccctcaggaaatgacaatctatgtctacatgcttggttttctcatgatgaactagatatgctgctatggcaagagcagcttggttatcacagtagataggagtagcactggactttttaatgcgaagatctttgaggagttgtttgatccacatcacctcacacacagcaagagccatggatctgtactctgcactgaccacaagaaattgcctctttgactttcaagatacggggggagtcaccaaggagcacacaaaaccagatgtagaatttacaacacccatcccattcactatcacaaaatgctgttagttgagcactagacttgttcgccatgagaattcaccctgttggcagcttgaagatgcacattagtggggcagtgcataaatttgcttaaatcatgtatagtgaaggcaatatcaggcattgccttgtaatagtgagataaatgagcttccccatcaatttttgatacacatcaggttgttgaagaggatcaccattgtcagcatagagcttgacatgtgagtccatacgaagcctcaatcgtctgcaatttataaaaccatattcatcaacaagacccatcacatacttctttagagataaaaacgatacttcactacactgatccacttcaatcctcaaaaaatatcttaggccacccatatctttcatgtgaaattggccagcgaagaaactctttgcttcctcaatagttgctaaactattgccagcaagaatgaggtcgtccacatacaccaatatagcactgaaacagtgagagttttgcttgaagaatagagagtagtcacacttggattaagtgaatacattttgctttaaagcagtgttagcttggcaaaccattgcctcaaagcctacttcaagccataaagtgacttaagcagcttgcacaccttagttcatttggtgtcacttctgccatcagtacttagctccccctctccttgaactttgatcctgttacatgtttcactatatcctggtgatagcttcatgtatacactatcctacaattcaccatgcaaaaaagcatttttaacatccatttgtttgcaagaaccaaccctctaaggatgcaacaacaagcatgtggtcatctttgctacaggggtaaaagtctgctcataatctattccatatctctgtctgtcacccatgattacaagccttggcttatgcctattatttgtgccatcagtgctgtattttgttctgatccatccatgtgagggatggctcatttctacaaaatcctagttccgttaggatttgtgttgttttcctaattctagtaggaataggactcctaaaatcctaatcctcctagttctgttaggagtttaaaagttttagtttgattgtaattctagttgtgttagaaatccaaatcctagattcatgtcacgtatggttagaacatggctagtaggataatttgtcttgtgatgtccatagccttggcatttgtggcacctaactttcaatagcttgtcttctgtctccttttctttctccttctttgaggaatcaacgtttttagagctatctaaaccactagcatcaatattaggtttaaaagtgctaaaagatttcgaatagttcttacttgcatacaatttctttttctagtttatgtagcgtcaccagggaacaaaaactcggccgttccgttctggaacggccgctttgtaacggatttcagagaggccgttccgttaaataccgttctagaacggtgatttggaattcacaccaaactcggcgcgatagcgttacgtaacggtgtaacggcgttccagaaccgttacaatcacataacgtccgttatttgaagaagaccagttcttttggtggaggaagaagaagagccaacgcaagatctatagatctgagttaaaatttgaaaataaaacatgtttttttatttaaattaaagcttacagaggatgtagaactcaaattcgagtaaacccctcctttaatttcattaggttactgcaaatcgaaccctaaattgcaaaccctaatttcgaaaaaaccctaatatgcattgggatgcaacgctgcttctccggtcatggcagagaaggtcgacgagtcatcttcggctgcttttagcactgtagctgccggtggttggcttgtttgcaggttagtgcttgctggttttctttctctcataccgatcatcttcttcttttctctcttctctttttcttttttattgtgtgactgccagtcacgtgataattgcaactcataaagtatctctttctctctcttcttttcatccctttttatttttctttcccttttagtttttattccctcacgtggaatcacctaattttcatccttttttatttttttagttacactcttacacagaagtatgttcaaatatcattatagtacctcaaatattgtatttataagagttttggacataatatgatatagaaagtaaaatagaagaaaaataaagtttaaatgtcacttgtgtgatttttttaaaaaaattcacgccgcgacggccgcgaaacgttctatttcccgttacaagccgttcccgcgataacgcgaccgttcccgcgaacgcgaccgcgaccgcgttttttttccttgagcgtcacatcttgcaagcttcttcaaaggtgagttatgtgtacaactccaatttctctccaatcccctccgtcctcatttaggcctccaaggaagctacttaaacattgatcttcaagttcatcaattttccaaagaatggataacttctcgaactcctttatgtaatcttcaacggacatattcccttgtttaagagtagaccattccatgtacaagctttgtttgtagttagaaggaacaaaacgtcctcttaacaactttttaagcttatcccaagtagagattttgggtttattagctttcacacgctgcctctttactccatccaaccaaatagatgcatatttggttaccttaagcacggccaccttgtatttcttttcttttggtgtctcttaatcccaagtagagcttttgcgtgtgaaagctaataaacacaaaatctctacttgggataatcttcttcttgtttccgaaacaactaattcttatggtagttaggaaagcaagaatggtttctaattcaatagggaatatattaattattattagtttaagttaaatagtgcacgaatctaaatagattattcgtctcaaaatctcacttaagtatagatttgtttggacatctgagggaagaagaagagagcgagataaaggagaattatcactcaatgaatccatatcccgagttttcccatttacttctttgaaagcaatatagttcacgaggtcttattatcagtctatggacataagagtaataatttaagggcaaaaactatgactttatgggtttaaactgatacatgttctgttaaactgatagatgttctgtgttaaaccgatactcatatattcctggttaaactgatagatatatgatttaaattgatacccgtctcagtcatgtcttggattgagacggtctgacacaagactttttgtgtattatatatctgattagaataaatttatcctgtttactaattattttatcttctccagacacttgttgacacaatatgcaatcagtttggtaaagatgaactcaaactacagtgcaaggtcctttcattgtcctacagtcataaggggatcccttcttcagaaaattgggtcgtgtcttctgtgtcaaaaaattccattgaagatcaacaatatgatgctgtcatcgttaccgtgagttttactttgcttactgctattgcaccaatctttcttcttttgacacactgataatggcaatgctgttgtggtttgaagccatgttatggggttttagggatatttatggagtctgatctaatatgttattggataaaattcagatctgtaacgtgactcaatgagattgaaaaaaattgaatcaagataatggattggaaaattaggagctaacctagggtctataagcgatccacttggagtctcataccaagcaggtattcgacattttaggtttatattgctgctatggctcatatgggagcctacatagggtctggtgcttattcctttttcttttgtctagttttggggctgcacatttctgttgtgttttgatatggatagccatcacctgcaattgcatggaggctgaactaagttctataggggagcaaacagtatctgttggaaatttattttcatattgtgtttttaaatgctataatccaaaatttgttgttcccctaaaatgcctaaaatacccttatgtaactgctccatctgtcccttaatagacttcccatttctccaatgcatgtttgccaatacacattttgtattgttaatatcaaaaattacatattagtaaaaattataaaagtttgattttcctaatgtacgcaatgagacgaatcaaacaagacgccatatgactatgttttttcttatacttcctatgttttttaataagtgacatgttttccttttagggaaatgtcacaataagtgacacatagctcaaagtagtaaaaatacttctcatttattacatctttgccattatttaattgtttcacctacctactttatccaatactcaaatttgattggttgaacaattggtcccaactttctctagactccttggtattccctttcccccactttctctctgtgtcacttattaaaaaatggaggacgtatattggaaaaaaattggaaggttttcttcacttatgaatagtggtaaaattagagatgggaaggctattttgggatggatggagtaatatttaaatttttaaaataatgtcattgttttagtgatgaaataaaattcaaggctattttttctagtaattatgttatctgtacatcaccacacgtatcgcgtgcatataagactagtttgatgatattccaacactgttcgaaggaagtcaggcatggaaccatgtttgcttccatatgggaaatattttgcttactctccttcaaacatctacctcattatcccagaatgattgatcgaatctaatacaaatatacaattgatcatatgccaccagggaattacatcaaattaaatttttatagaaggggaatcagtcatagcctcatagggaacgaataagtgatactcgccagtttctttcctggttacttttcctcttctcactagccatcctttatgtatgggtatgctgcatcattcctgccactggttgggactcccgtttgaactatggggggatgggaaagctaagccatcatcttcaaattgagtttcttgagaatgtaagacaccatctgtaagatgaatatagtgcactctatagtcaatgtcatgatctttatgggtttatctgctgaaataactgtgatatacccagctctccatttacaaagttttcctacatattaaactcttgcccgcaattctagaacttcattgtagaacttttcctacataagcatcatttgtcttttctgtagtaaaagttagaaagagctttattttagaacattcgtttttagttttctttgttgttgattactccgccacttttaatacttttatgattcaagtatttgacaaaatcatgtaatttaggtcctctgctgcatgcagtctataccctctctctctctctctctctctctctctctgtggttgtgtcttacttgttgagttactaactccagccattacataaagtaggctggcattatgatgagcaaattactcaagaccacatgttagctcctttttcttttctccttattctgaaaggcaaatataggtccatcttggtgcttctcatgtcataagtaagctgaccccctccttttccagggaataggacaataatccaaaagtgagggttttacatgttgggatttgtgaagtttcttattttacttaatagccgagtcagtgttacaatacatagtaccgtgttacaaaatagtatgtaacaccaagcatgtttatgtgcaaaattgtgcaagactttgttgctggcacgccaagggctgttttaatgtagtttacttattcttttaggtttttcagatgacaatcataaagggaattaggagtgtttttattgtagtcaatccctattgtgctacaacgataaaagaaaaaagcacaagactagaaggagaagtaatgtctaggaaagactcctcacctggggttgctagtcacctacacatcttagaaggcatcaaaccaaagcttattcccctcgactgttttcgggagaaaagaagacaaaattgtttctaacttatactttaccagtttcactacagcatcagaaagaagcaaaatatgctcccacaacacggcgaacctagctttccagatgtgataaaccagaccagcaaaatgattattttcactagagctttgagtctattttttcggtttttccccttcttcctggtaatgtcacgccaccaagccatcatctcaattttttgagatttgacgtaatcgctcaaatagctgagtaagacacttcttgctctaaatactaataaaaaagaggtgaatgtgggtctcagccatgttactcaaatcggataaagtgtctactcttattagggtttttgggtgttggactcatccatttttttttgtaaaatgtcaagattttggtttgaaatgagagattcaagtgtcgtgacatgagtcggcacgcaacacttaaacgtgtcgaagtaacagagggtctcagacaatcaactttaatcaatcacgaaccccaaaatttatgcaacctttgctcatattcagtctctgtaaagcactcaactgcagcacacccacccattcgcttcacctacagcaggagggcacccaagtaattgctatgatgagcgaattattctgttttgccttgctggaatattgctgttagatttgctgactcactggcagttaattatagtcagagaatgagaaatatcctgtagagagagaaagggtatcttttgtatttagctctataaatagctaaggaagggaagggcattgagagtttatgatattataataggagagatttagcctctcgaatgctgataggagcgtagctcttgttggattatcaatactactctgtttgctctatctatttctactcaggttccttcttgtacagtggatccctgattggatttacttcatcaaccagcagataaaattatttgtaggcacattgaaaccattccaaacctaatgaggccaaagtttatcacaaagaatataggagccaaatgtaggcaacagataagagtataattgccagaagttgaagactccaggtattgttcagaaaccttaatgcatatcatcattctgacactagattttccccggagccaactaacaaaaatgaattaaagagattaaggctatgtttagttcacctgaaattttctgatctgaacttatctgatctgatctgaacttattttttctgatctgatctgatctgatctgaaccaatctgattacaagatcttatcttttagatttttctcaatatataagaaaaaatatagtcatgtggggtcttgtttgattcgtctcaatgagtactttattaatattcaattattataatttttactaatatgtaatgaaagatataatgatttttaaatataagcatgatctgaactgatctgatgtgaacttattttttctgatctgatctgatctgattagatctgaaataagcaaaaataaggtgaactgaacatagcctaagcaacaattgagggaaaataagatcattatggctaagataagataaatatgtaatgataaaatcagagtaattatatcagttacactctcaacattcgtcagattgaggtttcctcccaaaatgccaacccacttttctgtattttcacgtccttctctctacccttctaggtatatattacatcagctgtaaaatttttgaaccaactagtagaatactgatctaccctcaactgcctcactttctcattttttctgggcctttttctctctagcacaagtccacataagtgatgcatagcagaaatataattccactagtcatcctcaatattgatataacaaacacatcacccacatattatcatttttaatcgctgcatgcgaggcatacttacccaccaatcaggatatgcataacagcgttcctaattccaaaaccaccatatatcttgggtttgcaactctcatccctagcaacaaggggactttctgaaaaagtggcagattccgcccacaagtagtttgtacggacacctttattatattattaatatcatatttcggcaacacaaattaccagcccagtaaaacatgaattgacatgagactaacaaggggcccaatctaatatcgtacgtctgtactaagcaatgtataaaaaaaagctcaaggtgcattgatgcaatagggatcctaatgtgcataggtgcgcctcattgaagtgaggcaccactaaggataaataaaaaagattgatgtaaaattaaattgtgcaccttgggtgcgcctcgatgaactttttttgtgtgcctaagtgtacctcaagtacgcctcattgatatcgcctcgcctggcagaaaacgagcttgaccccaatcgccttgctccccaccgcctaggcgtgcctcagtcacactttttaaatacattggtattaagtactcagaatggcaaaaagaaactttgggcattaattagacatttcactttttgtgcaactatttgtgacttcagagattgatatgttttctacattacagacttttgtgatggctgcatggtctccactgtcaaagaacattagtttaagtagaagaaatattgctctattaccttcctccctctacaaacaaaatcctaaaatgtggttatgtagtgccaattcaaacttgtagatgcatgactaatgctttcattatgctgtgggtttttatactatgattcatgtccaattacataacaattagctggagtcaggatatgtcacggaaattttaagcctggcaggatgattgtttatattttctctttttcggtgtttaagtcaaagtaaacttctaggctgctcttttataggctagttgggctgttggggagatctacacattaagtgtgaagaaatcttgtctaactccagtttggttgagaactgtaagctgtcataacatttgttgcatgatgaggccttgtgggattatcatgttagctgtaaactctaaacttacttgaaatctagtgttgtgtctccttatttctgtagtcaaaattgaaccttctgtacgtttttgatacctgcgactagaatgatggaattctgaattactgatactattacaaccatctgctaagaacgaagatgactcttagctaatttctcagcagatttagagaaattaagaagaattactaatgaatatttaaagagaaaactaccaagatatgattgtattgatgaaaaacaccaattacaacctaaccaacattcgagaggttggagctctcccaagtaaccatttctctcactaaacttatcaattttcaagatgccttttccattctcagttcctctatatttatactactccccttagcaaactacccaacttattccccaagtaaactaaagagataatatctaaaatacccttccccctacaataatattagttcttagcattaccggccccctaaacttccaccttgtcctcaaggtgggtcgtaatcatcactaaattctgggcctctactcgtatattcagtgtcttgcagcccttcaggccccaagcctaggttatgcagctcgtgttgcggctcctcctcatatagttctctggctggagtgagtgcctcaactataatgaaaaagtcctggaggtggggaaggaaggagtgtctgaaatggtgtggtgtgctgctggtgttatgggcttgtgcctgaaagttttgggtttaaagagatggagtggagaagagtggagaagtgactggagacgtaaaagaaggaatcataatttttgtaagtggtgggttgaaaaagttggtgggaagaattgtttttataaaatgtagtgtaatggtcgaaaaatgggtggagtaagtatggtttttggctggggatgtggtactgggttgaaaataaataggtctgagcttacttgtaaaattggcctcaacatgagcaggcccaatatcttgagccaattccccaaaagctggcaatagagcactcttaattgcattgttgtgggccatcgggctccaaacatatattcggaggagccggacttctttggtgatgtcattagcttggcccattgcacactttcccttaacagcctcaagatcttttcccacttttgtaccccaaccacgtggcttcaccatcctttctttcttgcttttgtcacttttttggcaatatacgagtttgtccttactaccctcatcttctaatgttggcttcctcaccaagcttaatttctggaattttgtccaccaaatcccaccacccatcgtcaacaccatacctatctacaccggccaagaagcctggtcctccacccgaattttcgccacagacaaagcctgaacaaccgtcagttctctcaccggagaagttcacaggtccaccacctgacccactagttgctgatccacccttcacaaatctccctcctctggctgccacaagtagtggttcctccgtaatactcatatttctcgtccaagagccctggaccaccaccggacccacttccaccggcaccaacttgttcaaatgatacttctctttcttttccaaacagcctacttggactggaaaaaccactgcgattgtagcctccgccagatctgtagcctagtgcacctaacgtgcttccaactgcaacccaatagggatggaaatggatgggattcggggagggtggagcatcacccgcatccgtcacccgcatccattcgctccacccgctccacccgcatccatccatccgtcacccacgggtgaaacgggtgggtcggtgataaacgggtggaaccatttagggggtgtttggtatcatgtttttttacaaaagaaacagaatcaagtaacaaaatccgtttctacttgtttggttctatgttgctcagactcgagtacccatgtccgacacgggtacgtgtccaagtgtccaactcagctattttctagaattttttatattttttaacccaaaacaaagtgtccaagtgtcccacccatgtccgactcccgaggatccgacacgggtacttgaggtgaaatgaagagtccgagcaacggaggtttggttagtgtgtaaagtaacaattaccgttacttgaggaaaacacatccccccaagttgtttccattcaaaaacctaaggaaacaaataacgtttcactcctcaaacaagaggaaagggaatgggttatatttatttccattccattaggataccaaacaactaataagggtaacacttattattatcctttcccctccttatcaaaatcctttccattccgtttacggtattcataccaaacacccccttagtatattttctaatgaaatttgtgatatgatatgcatgatataaaataattctatcaaaaatataaaaagtaagtaaacttacatgtacaacttaatagatgggtgatgggttggaggttaaacgagtgatggatcgggtgacgggtgaagaaattctcacccaccactcgctttccatccatttaaattaggtttttcatccatttaaaaaaccgggttaaacaggtgatgtatgatccatcacccatttccatcctcaaacacatcccgatttgtttactgcaccaccagatccaccagtataaccacccgaaaaatcatcatgccttctactagccttgtaacctgctcccggtgagaagcttcttccacaagtggtggtcgctggacctccatctccttcttccccaaaaaattttccatgacacccactcgacccttcatctgtgacaacctcttcttcgtccacctctgaagttttggggtcgtcttcctcctcaagctcctcttgaagtaactttaacttccgttggatgggagagaacgcttcattgattatcttcaccagatcttcttgaagtttctcgaaactttttctcacgttttcctctacctctttcgtgatttcctttccgatctccttcatttttagactaggagctcttgcgattccatggcagatttctttttttaaaacaagaaaatcaggcacttaatctcccagaatagtggtgctctgataccattttctaagaaccaagatgactcttagctaatttctcagcataacaacaaatttagagaaattaagaagaattactaatgaatatttaaagagaaaactactaagatatgattgtattgatgaaaaacaccgattacaacctaaccaagaggttggagctctcccaagtaaccatttctctcactaaacttatcaattttcaagatgccgtttactactccccttagcaaactacccaacttattccccaataaactaaagagataatatctaaaatacccttccccctacaatattagttcttagcaccatcaaactgggatggatggttttgtaaggttccaatttacttctccatcaaaatattttaggattttttatctcatgtattttagagtttcctcgtccctttttatctgataagattcttctgatgatttgattttatggtaggctccaatcagcaatattaaagaactgaagattctgaaagctggagttccattttcacttgacttcattccagaggtttgtatttttatagtggttagacatgcttcccctagttttcaaagtaaaagcatccttgttgtgacgatattttttcccttgtttttgtttttattattatcatcacttatttccattttctattttccatgctgataagatgttcatcaccataatcttgtggtatcagaagtgtttagtggagtttattcactacacatgcagttgttcttttgccatgaccgccattcattttctcgtcaaaacaaatctatgaagtttggttttcagactcatggttcttgtagctcttgtgaatttttttttcttctccttgcatgcattcttcaaattacatattgcatataccaggtgctctcctttattttatatttaatttttaaaattctatcatatattttttaatgtcaaacctcaaactaggggttcactgcatcttaggcttaccaggctaatatttctttacttaaccttttccctttatatttgctatcctcttgtgtagtaatcaccataagaagggtacaaactaaattaccctcccattcttttgtatcattctgaaatagtgtcacagagctttgatttttttgccctcatttaatctggcaaatgttctctctatttttttttttttactttcttttgacgggattctcaggcaattgttacggggagcagccagtcacactgtttctgtttattatgcaggtgagttacctgcccctctctgttatgattactgcgtttaagaagaccagcgttacaagacctcttgagggcttcggagttcttatcccttcgaatgagcaacataatggactgaagactctcggtaattgtctggttcacgtgtgtagcgaatcagattttcaaaccctgatttcgtaacattgcaggtactctgttttcatctatgatgtttccagatcgtgctttctccgatatgtatctctatactaccttrgttggaggaagcagaaatagagaacttgcaaaagcttcaacgtatgagatatgcaatgttttaaatgtatgctatagtcatcgtttcaaccttttggtgcctttttcttactaatttatcctcctggtttaatgatcttagggatgaattggagcaaatagtttcgtctgatctccaccagctgttgggcactgagggaaaacctacttttgtgaagtattgatatctttcacccaacttaacatgatttgtgcttataatatgttaaataaagtaactgaaatcctgaaattaagactacgaaactgtatggtgacagtcatttttactggaacaatgcattccctttatatgggcacaattacgactcagttctgagagcaatagaaaagatggaaagagatcttcctggacttttttacgcaggtaatctgtcatttgcttgttgcgataaagttcatgtacagttggcatatcaatcaacttgcattctttcttgctaactccaaacaatcaggatcattaacttgtaggctgcagcaacagagagtatctcccaagttgttaggtttcatgtaacctcgtcgctgagatgaaatttccgttggctaaaaagtgaaagttttgtattgatgttacccaaaacaaaagtattttgcatgttgcttgaagttttggttgtttcagatagtacatcctttgacatgaaaataaatggaaaagcgtatgtcaagcaattatcatctagtttctttgtttctagatactagccgcatttgatcccagatcatttttgaggaagtcagctgaaataccgtagctatccttcagttttcataataaaactttaatggatctgatgtacagtaatttagtgtgcaccgggttaataattgatattaacttcatatagtgagtcttataaagatataatgaacttatatacaatatagtggattttattaatggaaaacatatagtgaaactatatgcaatatagtatgatacataaagacttagacaacaagagcattcgaaattacaaagaacaaaggaaagaacaattgtatcaaaccggttcgaatgaacaaacaaccaccacttccacaatcaatgtaccaccaatcaagactaaactataacaatgagcttctagtttaagtctactttgagttttaatcaccaattcaacgattagatgatcaaaattgcaaaggttaagagttggtcaaacctaaccaagagttacactaggcacatagctttgttaggagtatattagtttatgaattctagttaagttagaaatccaatacctagttggattaggattcctaattggattagaattatagtttagttagaattctagtaatagtaggcgtgtgattaggagatataattagcttaattcttatattgttagtttaattcttatcctcgttttaggtttatctttagtcgaacttgtaccctatataaggggcctttatttcattaataatatagtttattttgagtttaaacctttacttgtgattgtttgcttgagaggttattaatcgaaccattaataacttttcaggattgttaagtttttagtgttaaacatcttaatttcaggagtgattttaagagtgtttagattcttgtattcaagtttcaggactgatcttgaatcaagaaatatccctagtttcgactaatatcataagtagttcgaattcttggagtcttttcttcaagattcatattcataacttgattatttagacttcttggttttgtaatcatatcaagtggtatcagttttccagggaggagaggatacaaagggttctctttgatcaaagaagatccaagggcatcaataagaatgacacttgcaataagttcgagtgatacaaacaacttcaagactcgatcttttgctaccaagaaccaatcttgacgcctgaagattgttaggacaaaggataagaagtgtttctacatccaagattgcattctttacgtccaagattgcgtcaagatccattctttaagttcaagaaaggagtagaaagcattcgaacactacttaaacatgacatccgagatggataagctggctatggccatgagtgccttggcacaatcacaaactgagtcacgcaaccacatgggtaggatggaggcacgtgaccgtggattgaaactagatgactatagtggagatggcaatccagaagacttgttggagtggatttgccaactaggcaaagtgagtgattataggggctttgatcacaagaagagattcaaggttgcttccattaggctcacgaagtatgctggaatacggctcgaaggattgcatgcacaaacttcttgcctaatgactatgaacaaaaacagttcataaggctcgcatcaataagccaaaacacacttagtgtacacgaatacagcatggagtttgacaaattagggcttatatgtgacatagaagagaaagagcaatacaagattgcaatgtacattaaagggttgaatcgatatatagccaagaagatcgaagtctcaacttatcacttctttgaggatgtgactaaattggctaagaaattcgaagagcatgacaaagaagaagggcctaagagttcttacacacctaagtatgactctagtgctaaagggaaatcaacagttccctactcaaggtggtcggaaagacctaagaaccccactacacctaaggaggacactagcatggagaagacaaaagtggccgtacctaaggagagtttaattttgtgttttatacatctttgcttaagagcttaacaattgaaactattaataacttttcaggatggttaagtttttagtgttaaacatcttaatttcaggagtgattttaagagtatttagattcttgtattcaagtttcaggagtgatcttgaatcaagaaatatccccttgttcaactattataattgatcttattcgagttcttggagttaatttcttcaagattcatattcatacttgattattagacttcttggtttagtaatcatatcaatatcattagcattaatttacccccagggagattaagaaaggattagcctaatcaaggcgcttaagaagtttttaggaaaaatcgtgcttgttaagcttaagaattgaacttctttcaccatttgcccttgattctcttgttgaactagaagatcttggttcatagtagatgctcctgcatcatagtagagcatttaattttaattttttaacatgcacgaagatgtaggtagtgtagtatatatcgtgagacgtggtttaacatatagaaagatgtagtttctgcatgatatagtgagtttttgcatgatatagtgaatgtctgaatgatacagtggatcgttccgaattgttgtagtttgtatgatatagtatttttgtgaatgatatagtgagtttcttcatgatacaatgggtttctgaatgatatagtggattgcttagaaatgatatagtgagcttttgtatcatgtagtaggtttctatgtgatataggttgttaaaagatgatacatgcttttggcctcatgtactctaatgttaacgtgaacccggtccttgcaagtcaattgcagttttttcaatattaagctatttttttttttttttttttttttttttttttttttttgtacgggaatatttagcatctttaccacaaacataaccatacgaatattatgcggaaattccagtctgaagtcttaacttttcaaaattaaaagcttctatattatttttggaatgaaaaaaaatgagctatggcatgttattttgaaatacaatgagtctcaaggtgcatagtggcttcaattctacgaataatgaatggactactgatttctaattttttgttccgggcttttgcattaggtaaccataaagatggactctctgtgggaagaactatttcctctggatacaaagctgcggagcttgtgatatcctatctcaactctacttaagatgcctaaatgatcgaggagactccgtaagtcctttctctgattctatctttgaactgagtggaaacacgactgtggtctaaagtagttgatgtctcagatatccagaaatggcgttagtgatattcaggagctgtccattgaccctttgattcattgttgcagtttactgaaagttgttagctggtctcagaaaaacgaaaggaaaaaagggggaaaacaaaaacaaagaaacgtagattgtggtgttaaaatcaagaattccagagatttgtaccttctttatcagttgaattgtttacagtgtgaatcaagaagttagctcgaccttcttttcttgtgaatggtaagatttcgtgatcatcaatacttgattgtgctgtttgcaacttcaacggtaagatttcctgatcttacagtttaattgcttgtgctgtttgccactt

SEQ ID NO: 47 - DNA, 1575 bp, synthetic construct
  misc_feature 1..1575: note = F420L mutated Beta vulgaris PPO2
  source 1..1575: mol_type = other DNA
atggtaatgctatacgattctcacctctcaggagtctcaactcatcttcaactatcgcaggcatttcccaggaagaacccattaatggccaaagtgtctgagccgggtaaacccacttctgctaaaaggattgctgttgttggtgctggtgttagtggacttgctgccgcatataagctaaagtcccatggcttgagtgtgacattgtttgaagctgatactagagctggaggaaaactcaaaactgttgcaaaggatggtttgatttgggatgagggggcaaatactatgatagagagtgaagcggaggtcacgagtttactcgatgatcttgggcttcgtgagaagcagcagtttccaattgcacaaaacaaaagatacattgcgagagacggtcgtcctgtgctgataccttcgagtcccattgcacttctcaagagcaatatcctttcagcgcaatctaagctacaacttatgttggagccattcctttggagaaaacgctatgcttctaagatttctgatgagcatgctcaggaaagtgtgggtgagttttttgagcgacattttgggaaagagtttgttgattatctaattgatccttttgtcgcgggtacaagtggaggagatcctcagtctctttctatgcgtcatgcatttccagaagtatggaatattgagaacaagtttggctcactaatttccggattaattcaatctaaactgtctccaaagaaggaaaagggtggaggaggaaagccttcttctaatgaaaagacacgcatacgtggttcgttttctttccagggtggaatgcagacacttgttgacacaatatgcaatcagtttggtaaagatgaactcaaactacagtgcaaggtcctttcattgtcctacagtcataaggggatcccttcttcagaaaattgggtcgtgtcttctgtgtcaaaaaattccattgaagatcaacaatatgatgctgtcatcgttaccgctccaatcagcaatattaaagaactgaagattctgaaagctggagttccattttcacttgacttcattccagaggtgagttacctgcccctctctgttatgattactgcgtttaagaagaccagcgttacaagacctcttgagggcttcggagttcttatcccttcgaatgagcaacataatggactgaagactctcggtactctgttttcatctatgatgtttccagatcgtgctttctccgatatgtatctctatactaccttrgttggaggaagcagaaatagagaacttgcaaaagcttcaacggatgaattggagcaaatagtttcgtctgatctccaccagctgttgggcactgagggaaaacctacttttgtgaatcatttttactggaacaatgcattccctttatatgggcacaattacgactcagttctgagagcaatagaaaagatggaaagagatcttcctggacttttttacgcaggtaaccataaagatggactctctgtgggaagaactatttcctctggatacaaagctgcggagcttgtgatatcctatctcaactctacttaa

SEQ ID NO: 48 - DNA, 251 bp, synthetic construct
  misc_feature 1..251: note = Donor template for F420M
  source 1..251: mol_type = other DNA
ggaggataaattagtaagaaaaaggcaccaaaaggttgaaacgatgactatagcatacatttaaaacattgcatatctcatacgttgaagcttttgcaagttctctatttctgcttcctccaaccatggtagtatagagatacatatcggagaaagcacgatctggaaacatcatagatgaaaacagagtacctgcaatgttacgaaatcagggtttgaaaatctgattcgctacacacgtgaaccagaca

SEQ ID NO: 49 - DNA, 251 bp, synthetic construct
  misc_feature 1..251: note = Donor template for F420I
  source 1..251: mol_type = other DNA
ggaggataaattagtaagaaaaaggcaccaaaaggttgaaacgatgactatagcatacatttaaaacattgcatatctcatacgttgaagcttttgcaagttctctatttctgcttcctccaacdatggtagtatagagatacatatcggagaaagcacgatctggaaacatcatagatgaaaacagagtacctgcaatgttacgaaatcagggtttgaaaatctgattcgctacacacgtgaaccagaca

SEQ ID NO: 50 - DNA, 251 bp, synthetic construct
  misc_feature 1..251: note = Donor template for F420L
  variation 125: note = n is any nucleotide
  source 1..251: mol_type = other DNA
ggaggataaattagtaagaaaaaggcaccaaaaggttgaaacgatgactatagcatacatttaaaacattgcatatctcatacgttgaagcttttgcaagttctctatttctgcttcctccaacnagggtagtatagagatacatatcggagaaagcacgatctggaaacatcatagatgaaaacagagtacctgcaatgttacgaaatcagggtttgaaaatctgattcgctacacacgtgaaccagaca

SEQ ID NO: 51 - DNA, 262 bp, synthetic construct
  misc_feature 1..262: note = Donor template for dG209
  source 1..262: mol_type = other DNA
aaaatgaacaattgggaacttcaaattcaaaataaagctacatctatttttgacagaacaactggaaaagaatctatttccagcctccaaaaaattgggagtgaagcacaaaatgttcacttacagaaagagactgaggatctccacttgtacccgcgacaaaaggatcaattagataatcaacaaactgcagcgaagtataattatcagcaacattacaatttaccactaaagcagaaatactatggtaaaccattacctc

SEQ ID NO: 52 - DNA, 335 bp, synthetic construct
  misc_feature 1..335: note = Donor template for R126A
  variation 197: note = n is any nucleotide
  source 1..335: mol_type = other DNA
tgcaatgggactcgaaggtatctgcacagaataagaggcaaatgtcataagatacagagaagaaaggatgtaaaatagagagaacttgcctcctgcatcaccatgtttccaggctccagagttgaaagatcttaaaagaggtcaaaagtaaaacaagcaaacttaccagcacaggacgaccgtctctcgcaatgtangctttgttttgtgcaattggctatgacagagttagcaatcagacaaacttggaaagttagccacgaaactgaatcagaaagcaacatgaagatgaagccatctagaaagaaaaggcaattacaatctttcgaaataaa

SEQ ID NO: 53 - DNA, 335 bp, synthetic construct
  misc_feature 1..335: note = Donor template for R126G
  variation 197: note = n is any nucleotide
  source 1..335: mol_type = other DNA
tgcaatgggactcgaaggtatctgcacagaataagaggcaaatgtcataagatacagagaagaaaggatgtaaaatagagagaacttgcctcctgcatcaccatgtttccaggctccagagttgaaagatcttaaaagaggtcaaaagtaaaacaagcaaacttaccagcacaggacgaccgtctctcgcaatgtancctttgttttgtgcaattggctatgacagagttagcaatcagacaaacttggaaagttagccacgaaactgaatcagaaagcaacatgaagatgaagccatctagaaagaaaaggcaattacaatctttcgaaataaa

SEQ ID NO: 54 - DNA, 335 bp, synthetic construct
  misc_feature 1..335: note = Donor template for R126L
  variation 197: note = n is any nucleotide
  source 1..335: mol_type = other DNA
tgcaatgggactcgaaggtatctgcacagaataagaggcaaatgtcataagatacagagaagaaaggatgtaaaatagagagaacttgcctcctgcatcaccatgtttccaggctccagagttgaaagatcttaaaagaggtcaaaagtaaaacaagcaaacttaccagcacaggacgaccgtctctcgcaatgtanagtttgttttgtgcaattggctatgacagagttagcaatcagacaaacttggaaagttagccacgaaactgaatcagaaagcaacatgaagatgaagccatctagaaagaaaaggcaattacaatctttcgaaataaa

SEQ ID NO: 55 - DNA, 335 bp, synthetic construct
  misc_feature 1..335: note = Donor template for R126I
  source 1..335: mol_type = other DNA
tgcaatgggactcgaaggtatctgcacagaataagaggcaaatgtcataagatacagagaagaaaggatgtaaaatagagagaacttgcctcctgcatcaccatgtttccaggctccagagttgaaagatcttaaaagaggtcaaaagtaaaacaagcaaacttaccagcacaggacgaccgtctctcgcaatgtadattttgttttgtgcaattggctatgacagagttagcaatcagacaaacttggaaagttagccacgaaactgaatcagaaagcaacatgaagatgaagccatctagaaagaaaaggcaattacaatctttcgaaataaa

SEQ ID NO: 56 - DNA, 335 bp, synthetic construct
  misc_feature 1..335: note = Donor template for R126M
  source 1..335: mol_type = other DNA
tgcaatgggactcgaaggtatctgcacagaataagaggcaaatgtcataagatacagagaagaaaggatgtaaaatagagagaacttgcctcctgcatcaccatgtttccaggctccagagttgaaagatcttaaaagaggtcaaaagtaaaacaagcaaacttaccagcacaggacgaccgtctctcgcaatgtacattttgttttgtgcaattggctatgacagagttagcaatcagacaaacttggaaagttagccacgaaactgaatcagaaagcaacatgaagatgaagccatctagaaagaaaaggcaattacaatctttcgaaataaa

SEQ ID NO: 57 - DNA, 251 bp, synthetic construct
  misc_feature 1..251: note = Donor template for F420V
  variation 125: note = n is any nucleotide
  source 1..251: mol_type = other DNA
ggaggataaattagtaagaaaaaggcaccaaaaggttgaaacgatgactatagcatacatttaaaacattgcatatctcatacgttgaagcttttgcaagttctctatttctgcttcctccaacnacggtagtatagagatacatatcggagaaagcacgatctggaaacatcatagatgaaaacagagtacctgcaatgttacgaaatcagggtttgaaaatctgattcgctacacacgtgaaccagaca

SEQ ID NO: 58 - DNA, 161 bp, synthetic construct
  misc_feature 1..161: note = Donor template for R126L (for Cas9-Cpf1)
  source 1..161: mol_type = other DNA
cttcatgttgctttctgattcagtttcgtggctaactttccaagtttgtctgattgctaactctgtcatagccaattgcacaaaacaaattrtacattgcgagagacggtcgtcctgtgctggtaagtttgcttgttttacttttgacctcttttaagatc

SEQ ID NO: 59 - DNA, 161 bp, synthetic construct
  misc_feature 1..161: note = Donor template for R126L (for Cas9-Cpf1)
  variation 92: note = n is any nucleotide
  source 1..161: mol_type = other DNA
cttcatgttgctttctgattcagtttcgtggctaactttccaagtttgtctgattgctaactctgtcatagccaattgcacaaaacaaactntacattgcgagagacggtcgtcctgtgctggtaagtttgcttgttttacttttgacctcttttaagatc

SEQ ID NO: 60 - DNA, 175 bp, synthetic construct
  misc_feature 1..175: note = Donor template for G209 (for Cas9)
  source 1..175: mol_type = other DNA
gctgataattatacttcgctgcagtttgttgattatctaattgatccttttgtcgcgggtacaagtggagatcctcagtctctttctgtaagtgaacattttgtgcttcactcccaattttttggaggctggaaatagattcttttccagttgttctgtcaaaaatagatgtagc

SEQ ID NO: 61 - DNA, 155 bp, synthetic construct
  misc_feature 1..155: note = Donor template for G398A (for Cas9-Cpf1)
  variation 64: note = n is any nucleotide
  source 1..155: mol_type = other DNA
ggtagtatagagatacatatcggagaaagcacgatctggaaacatcatagatgaaaacagagtngctgcaatgttacgaaatcagggtttgaaaatctgattcgctacacacgtgaaccagacaattaccgagagtcttcagtccattatgttgc

SEQ ID NO: 62 - DNA, 200 bp, synthetic construct
  misc_feature 1..200: note = Donor template L397E and F420V (for Cas9)
  variation 165: note = n is any nucleotide
  source 1..200: mol_type = other DNA
cgaatgagcaacataatggactgaagactgarggtaattgtctggttcacgtgtgtagcgaatcagattttcaaaccctgatttcgtaacattgcaggtactctgttttcatctatgatgtttccagatcgtgctttctccgatatgtatctctatactaccgtngttggaggaagcagaaatagagaacttgcaaaagc

SEQ ID NO: 63 - DNA, 154 bp, synthetic construct
  misc_feature 1..154: note = Donor template for G209 (for Cpf1)
  source 1..154: mol_type = other DNA
ctatttccagcctccaaaaaattgggagtgaagcacaaaatgttcacttacagaaagagactgaggatctccacttgtacccgcgacaaaaggatcaattagataatcaacaaactgcagcgaagtataattatcagcaacattacaatttacc

SEQ ID NO: 64 - DNA, 200 bp, synthetic construct
  misc_feature 1..200: note = Donor template for L397E and F420V (for Cpf1)
  variation 36: note = n is any nucleotide
  source 1..200: mol_type = other DNA
gcttttgcaagttctctatttctgcttcctccaacnacggtagtatagagatacatatcggagaaagcacgatctggaaacatcatagatgaaaacagagtacctgcaatgttacgaaatcagggtttgaaaatctgattcgctacacacgtgaaccagacaattaccytcagtcttcagtccattatgttgctcattcg

SEQ ID NO: 65 - DNA, 251 bp, synthetic construct
  misc_feature 1..251: note = Donor template for F420L
  source 1..251: mol_type = other DNA
ggaggataaattagtaagaaaaaggcaccaaaaggttgaaacgatgactatagcatacatttaaaacattgcatatctcatacgttgaagcttttgcaagttctctatttctgcttcctccaacyaaggtagtatagagatacatatcggagaaagcacgatctggaaacatcatagatgaaaacagagtacctgcaatgttacgaaatcagggtttgaaaatctgattcgctacacacgtgaaccagaca

SEQ ID NO: 66 - DNA, 335 bp, synthetic construct
  misc_feature 1..335: note = Donor template for R126L
  source 1..335: mol_type = other DNA
tgcaatgggactcgaaggtatctgcacagaataagaggcaaatgtcataagatacagagaagaaaggatgtaaaatagagagaacttgcctcctgcatcaccatgtttccaggctccagagttgaaagatcttaaaagaggtcaaaagtaaaacaagcaaacttaccagcacaggacgaccgtctctcgcaatgtayaatttgttttgtgcaattggctatgacagagttagcaatcagacaaacttggaaagttagccacgaaactgaatcagaaagcaacatgaagatgaagccatctagaaagaaaaggcaattacaatctttcgaaataaa

SEQ ID NO: 67 - DNA, 20 bp, synthetic construct
  misc_feature 1..20: note = sgRNA 1 for L397E and F420V (for Cas9)
  source 1..20: mol_type = other DNA
ctctatactacctttgttgg

SEQ ID NO: 68 - DNA, 20 bp, synthetic construct
  misc_feature 1..20: note = sgRNA 2 for L397E and F420V (for Cas9)
  source 1..20: mol_type = other DNA
gaagactctcggtaattgtc

SEQ ID NO: 69 - DNA, 20 bp, synthetic construct
  misc_feature 1..20: note = sgRNA for R126L (for Cpf1)
  source 1..20: mol_type = other DNA
tgcaattggctatgacagag

SEQ ID NO: 70 - DNA, 23 bp, synthetic construct
  misc_feature 1..23: note = sgRNA1 for R126
  source 1..23: mol_type = other DNA
taactctgtcatagccaattgca

SEQ ID NO: 71 - DNA, 20 bp, synthetic construct
  misc_feature 1..20: note = sgRNA for R126L (for Cas9)
  source 1..20: mol_type = other DNA
aaaagatacattgcgagaga

SEQ ID NO: 72 - DNA, 20 bp, synthetic construct
  misc_feature 1..20: note = sgRNA for G398A (for Cpf1)
  source 1..20: mol_type = other DNA
aaaccctgatttcgtaacat

SEQ ID NO: 73 - DNA, 20 bp, synthetic construct
  misc_feature 1..20: note = sgRNA for L397E and F420V (for Cpf1)
  source 1..20: mol_type = other DNA
tccgatatgtatctctatac

SEQ ID NO: 74 - DNA, 23 bp, synthetic construct
  misc_feature 1..23: note = sgRNA2 for R126
  source 1..23: mol_type = other DNA
aactctggagcctggaaacatgg

SEQ ID NO: 75 - DNA, 23 bp, synthetic construct
  misc_feature 1..23: note = sgRNA1 for G209
  source 1..23: mol_type = other DNA
tcgcgggtacaagtggaggagat

SEQ ID NO: 76 - DNA, 23 bp, synthetic construct
  misc_feature 1..23: note = sgRNA2 for G209
  source 1..23: mol_type = other DNA
tgtaagtgaacattttgtgcttc

SEQ ID NO: 77 - DNA, 23 bp, synthetic construct
  misc_feature 1..23: note = sgRNA1 for F420
  source 1..23: mol_type = other DNA
tccgatatgtatctctatactac

SEQ ID NO: 78 - DNA, 23 bp, synthetic construct
  misc_feature 1..23: note = sgRNA2 for F420
  source 1..23: mol_type = other DNA
ttggaggaagcagaaatagagaa

SEQ ID NO: 79 - DNA, 20 bp, synthetic construct
  misc_feature 1..20: note = sgRNA for G209 (for Cas9)
  source 1..20: mol_type = other DNA
tcacttacagaaagagactg

SEQ ID NO: 80 - DNA, 20 bp, synthetic construct
  misc_feature 1..20: note = sgRNA for G398A (for Cas9)
  source 1..20: mol_type = other DNA
cctgcaatgttacgaaatca

SEQ ID NO: 81 - DNA, 44 bp, synthetic construct
  source 1..44: mol_type = other DNA
gaaggtgaccaagttcatgctacgaccgtctctcgcaatgtata

SEQ ID NO: 82 - DNA, 47 bp, synthetic construct
  source 1..47: mol_type = other DNA
gaaggtgaccaagttcatgctgtcatagccaattgcacaaaacaaat

SEQ ID NO: 83 - DNA, 43 bp, synthetic construct
  source 1..43: mol_type = other DNA
gaaggtcggagtcaacggattcgaccgtctctcgcaatgtatc

SEQ ID NO: 84 - DNA, 49 bp, synthetic construct
  source 1..49: mol_type = other DNA
gaaggtcggagtcaacggattctgtcatagccaattgcacaaaacaaaa

SEQ ID NO: 85 - DNA, 29 bp, synthetic construct
  source 1..29: mol_type = other DNA
gggcttcgtgagaagcagcagtttgtaag

SEQ ID NO: 86 - DNA, 28 bp, synthetic construct
  source 1..28: mol_type = other DNA
gcgctgaaaggatattgctcttgagaag

SEQ ID NO: 87 - DNA, 29 bp, synthetic construct
  source 1..29: mol_type = other DNA
ctctgtcatagccaattgcacaaaacaaa

SEQ ID NO: 88 - DNA, 30 bp, synthetic construct
  source 1..30: mol_type = other DNA
taattgccttttctttctagatggcttcat

SEQ ID NO: 89 - DNA, 25 bp, synthetic construct
  source 1..25: mol_type = other DNA
catgtttccaggctccagagttgaa

SEQ ID NO: 90 - DNA, 175 bp, synthetic construct
  source 1..175: mol_type = other DNA
gctgataattatacttcgctgcagtttgttgattatctaattgatccttttgtcgcgggtacaagtggagatcctcaatccctttctgtaagtgaacattttgtgcttcactcccaattttttggaggctggaaatagattcttttccagttgttctgtcaaaaatagatgtagc

SEQ ID NO: 91 - DNA, 155 bp, synthetic construct
  source 1..155: mol_type = other DNA
ggtagtatagagatacatatcggagaaagcacgatctggaaacatcatagatgaaaacagagtagctgcaatattgcggaatcagcgtttgaaaatctgattcgctacacacgtgaaccagacaattaccgagagtcttcagtccattatgttgc

SEQ ID NO: 92 - DNA, 200 bp, synthetic construct
  source 1..200: mol_type = other DNA
cgaatgagcaacataatggactgaagactgagggtaactgcctcgttcacgtgtgtagcgaatcagattttcaaaccctgatttcgtaacattgcaggtactctgttttcatctatgatgtttccagatcgtgctttctccgatatgtatctctatactaccgttgtcggcggaagcagaaatagagaacttgcaaaagc

SEQ ID NO: 93 - DNA, 161 bp, synthetic construct
  source 1..161: mol_type = other DNA
cttcatgttgctttctgattcagtttcgtggctaactttccaagtttgtctgattgctaactctgtcatagccaatcgcgcagaacaaattatacattgcgagagacggtcgtcctgtgctggtaagtttgcttgttttacttttgacctcttttaagatc

SEQ ID NO: 94 - DNA, 154 bp, synthetic construct
  source 1..154: mol_type = other DNA
ctatttccagcctccaaaaaattgggagtgaagcacaaaatgttcacttacagaaagagactgaggatctccacttgtacccgccacgaagggatcaattagataatcaacaaactgcagcgaagtataattatcagcaacattacaatttacc

SEQ ID NO: 95 - DNA, 155 bp, synthetic construct
  source 1..155: mol_type = other DNA
ggtagtatagagatacatatcggagaaagcacgatctggaaacatcatagatgaaaacagagtagctgcaatgttacgaaatcaaggattgagaatctgattcgctacacacgtgaaccagacaattaccgagagtcttcagtccattatgttgc

SEQ ID NO: 96 - DNA, 191 bp, synthetic construct
  source 1..191: mol_type = other DNA
ggcaccaaaaggttgaaacgatgactatagcatacatttaaaacattgcatatctcatacgttgaagcttttgcaagttctctatttctgcttcctccaacaacggtagtatagagatacatgtctgacaatgcacgatctggaaacatcatagatgaaaacagagtacctgcaatgttacgaaatcaggg

SEQ ID NO: 97 - DNA, 37006 bp, synthetic construct
  source 1..37006: mol_type = other DNA
tattccatcgaatgtagcaaattgactgtccgttgcaatttcggagtttccactcgtcgcatggtaaatggtaatgctatacgattctcacctctcaggagtctcaactcatcttcaactatcgcaggcatttcccaggaagaacccattaatggccaaagtgtctgagccgggtaaacccagtaagtcaaacattcgaatcacaactcaagcaaatttgtcttgtttgcgttatattttgctcatttcagccttttttgtttttccgacctttgcatactgaatattgtgtgtgtgtgtgtgtggggtttcagcttctgctaaaaggattgctgttgttggtgctggtgttaggtaaattttcgtctcttgcagagtttttgagtcatttgggaattctatgtgaaacttgtaactcccttcagtccaacgaacgcagtacaattttctatcaaatcatggtcctaatttccaattttccatatatattgttggaattatattgggattgtctatcactattaatagtattaggatcaattgtagagaagcacagaaatttttgggatcgaaagaatatctggattgccacattaacagcagatataattcttccaattggtttttggttcttcctaccttgacttgtctggtcaaacattataaactttaacctttaatatccattaaagtaaactataggatttttttgtctaaaacatgcttatataacatgaaatttgtgagaaaccaccttatatatatttttttgcgaaaacaaaccttaaacaaaattattatcgtgagaacaaaccttatgccaatttcgatcattgacccaaggttttggcattgaccgtgtcatgaattttgttgggtttaaaaagtcatgtgtcttgcatacgaaatggtaaatgcgggaaccttgggtcaatgtttggaatccgcataaggtttgttctcccaaaaaatgtttttgttcaaggtttgtttttgcaaaaaaacttatataaggtgctttctcagaaatttcatgttttataaagtagtatttgacaaaaaaccctaaaatatattatagaattattattgactaaattgtgtaaaaatgtactcttctaaaagtacattatagtattttagtggaacatttgcgagaaactactttataaatacgatttttgcgagaaatttcctaataaaaaaatgtgaagtgcaaaactatcttattgataattttctactccctcaaatccaaaatactatgaagtctttcctttctggtttgtcccagattagtttgtacgcttccatctttggtatgatcccacttttattatacttattagttttacgtgagttccttactctatctcttttaacaaaaatactcaactatctctatccaataaaaagttccttactagtcctatcacatctgctttttaataaaataacgtttgataaccacacaacttatatccttaaaatacacgttcaaccaagtgttgagattaatttggacggagggaataaatattttttgaggcatattggtagcagtattcggattccgataggttgactatgtttccaatgttgaccaacacttgccttgcatgtaattctaactttgctcttttttattcttcatttccctcgtattccatatacaatgtttagagacccattccttcctcttctcttctttcccttccttactatgctttgccataatcttcctcaaatgagtgcaaattaatttgtcgttgatgtaggccaactgattgtagcacatcttcatagttcatacctcaacacactcgtaattatattataccctacatgttaaatggctcatgaagctttattttatatcatacttcctccgtttcacaataagtgtaacacttttcttatttggaataatcacaataagtgaaaccaagctccaaatggtaagaaaagttcactcttattacaaatataccaccaaaaagtaagaggggatcacaacttcaatacttcttcactctactttattgtggtcccaactttctctctctaaattccttggtaactccccactttctctatgtttcacttatggtgaaatggaggaagtattttgtagtggtatttagctactaggccttggatgatatacaatcatacaatgtatttatattcacgataatttgctgcccaccttgattaccatgatttccaccaattttatcaatttcagtacttcaccaccccgaatttatattttttatttccaaccttggtatctccatttgtctgagtgcccgatccatttgtatcgcctccagaattgaagaagcttcctgcagctagacaattaggaaggttaaaaaagtttggagatggtggaggatagccataataatcattgttgggaggtggaacttggaaggttattgtagggttgaagtccttgatgaagaagaattgagttcaaatgagaggaaaaaggagcagggaagagggacaataagaaaaaaaagggtaaactaaaatcacgtgtaaggcatgtgcagatcaacatcagaaagcatagtcaacctactggtattagggcactgatacctttttgggtcaaaatttttttacaaggtatttcatgaggtagttttgtccatttttttttttacaaggtatcgtctcattttttttttatcatttagtttctcgcaataagtgtatttcatgaggtagttttttccaaaatttcctcatttattataaaatacctcatcttttccataaataatgcaatgtctagacttttacgctgtttacacatgctcctttgaccatctattgacacacaaggaaaaatagagtagagtcatgcaggatcttgttagatttttctcgatatatactttcaaaagatcaatttttttataattttttttttgaggggattttttttttataattatgtacttatcaaaggtcaaagttgtgcaccgggaagcataaaactctatgtgttgcaatttacatggaaggggaggagtataataagagaaaattatggtaaaaggttcattcctggagatcatgagaaaggaagtagaaagaacaaaaaagaacaatgggagtgcttttcaatgtttgttgtacgtagcatttattcatttgctataatgttttgtgacattgtagtggacttgctgccgcatataagctaaagtcccatggcttgagtgtgacattgtttgaagctgatactagagctggaggaaaactcaaaactgttgcaaaggatggtttgatttgggatgagggggcaaatactatggtaatgtttttgattattgcaggtcttgcactttagcgcacaattaatttctggatttttttttgtactgtggtggttatggtcatcaacatgtctcacccactgtgcttgcagatagagagtgaagcggaggtcacgagtttactcgatgatcttgggcttcgtgagaagcagcagtttgtaagtctttcattatctgaatggcacatactttatttcgaaagattgtaattgccttttctttctagatggcttcatcttcatgttgctttctgattcagtttcgtggctaactttccaagtttgtctgattgctaactctgtcatagccaattgcacaaaacaaaagatacattgcgagagacggtcgtcctgtgctggtaagtttgcttgttttacttttgacctcttttaagatctttcaactctggagcctggaaacatggtgatgcaggaggcaagttctctctattttacatcctttcttctctgtatcttatgacatttgcctcttattctgtgcagataccttcgagtcccattgcacttctcaagagcaatatcctttcagcgcaatctaaggtcgttttatgttaagacatacttgatgctgagagtttattgaattcttaaccttcttcttattttttttttatttttttagcaaaaggtaagtatattgcatttaccaaaaaacagtatgtacaccaccacagcagccatgtcagaatctagaaataccaccgaaaaaatcctacacccaaccagagacagttatattatatcctactcctaagtttctgtacccaatttacatcaatattggtccatttacaagatatttttataattcacagaagcacatcagttttaattagtttaataatgacctctggatgaataaccaactcagaccatatagccttattcctggctttccggaagttgtacgccagagcagcaagcacagcaatgcaaacctgtttcttatacctccttttatgtgtcttagcccatctcttatagctagtgaagatacagtcgtgtgcacaggattgaaccccaatccaactagcgaaagcctcacaacattatgactataaatacatctgaagtataaatgctgcacctttttctcctcttgcctgcacggtatcagaacaaatcccagctttagctaacaattccctggttttcagtttattcaatgccatcatgcaagcaatgaaagaatgttttggaacattcagtttgttccaaacacagtgagagcaagggacctttcctgcagttccacttagccacttatatccctgactaatagtatgactctttgcaccgtaaattgatttcaacttaactttttcataagcagtgaattgtgtgttgttagagtgtctagctgtctaggagattgggagaaaaggagggaccaaggagatagaaacacacctttgtgtttctttgtgtatttactttttagggtgggtcacgttttctgagaaatttgggaaaaggaagaaatagtaacacactttcccatttgtataacctgtatactggagctccaatataatttgcatttttttttgagctgcaagaatatgttgacaaacagttattgcttcttcctcagctacaacttatgttggagccattcctttggagaaaacgctatgcttctaagatttctgatgagcatgctcaggaaaggtaatgtcaagacatgtgttacctcgccttaattttcgttccaggaggtgagcatgcatttagaactaaaaggcacaaagactgttggtggtcttgcctgttcaaatataatggagaggagttttcgctacatttaccctctcttgaagtggggttgaaatatagcatcaagttgaatgcttgattaagtttaaaggacttgtgtaactctttttctgtttactgtgattacatgacctggttgattaacataatggtctgtttatctgtagtgtgggtgagttttttgagcgacattttgggaaagaggtaatggtttaccatagtatttctgctttagtggtaaattgtaatgttgctgataattatacttcgctgcagtttgttgattatctaattgatccttttgtcgcgggtacaagtggagatcctcaatccctttctgtaagtgaacattttgtgcttcactcccaattttttggaggctggaaatagattcttttccagttgttctgtcaaaaatagatgtagctttattttgaatttgaagttcccaattgttcattttgactattactgattattgctaagagtggcattatgctattatgctcctaaaagaaaggtgaattttgacctacatatagtataatgtatcaatattggtttaattgtttgttcttttgttccttttggtgctcatcttgcgccttgttctcatcgctcgttttttcatgttgcacttgatttaaatttgctcagcttaacttgtctttttgaatttatattacttattgctatattttactaatttcgttgaaactaattttttgctgaacttttcgttttgttgaaatcatttttctgaattaacttgattttcctgaatagaattgaattttggtgatcttaccttttctgcagccttttatttctttcttgtcctttttccaatctcatttttttatatttccattgtgttgacatcttatcattaactgtgcagatgcgtcatgcatttccagaagtatggaatattgagaacaagtatggaccataagacgtttattttaatcgacatgtatgtttcttagtttatacatatattaattctgtggtaaaaaaaccgaacaagaatatctttttttttttctatcatcaaaaagggtgaatatatgtagaggaaaaagatttgaatcaagatattagcctaaagcaataataatgttagtaatagctttaataacaaattcaaaacgtacattaatgaaccgagaggccggaaaatagttaaagtgaccactaagagaagcgaaggattcatgatgggttttcaacccagtagggcaaatttgttcaatgttctttacaaatcaagcttattaccttgtgggtgtttttgctagagatgaatgatagaattttccctagttggaagtcttttttggttactttatgggagctagtgatgtaatttgtttcgccttatggcatttcctaacatgtgcttttgtgatgtattgaagctttttttttgccttaatttatgctggattttaattttgttctttgtttcatttttcttgcttttgaaaaaaatatatagatatgtatatattaggattggtcgaggattttgagggaagggaaagacctaagaaaacttggatgagggtgattgatagtgatatgagtctatttgggatcgaagaaaatattcctttggataaggtgtagtggagggttgagggagcaaatttatgcagattagcttgacttaaagtttttctttttgattatttttcatttacttgtgttttgcaaacatttactcatgaatgatgtaaacttcttcaaccaaatctctggaaaaaaataatctacatggaaaaaacattattaatgttaacttgacagagatcccatccttgtgaagcagctagcaattaggcatctaacaattgacattttaatggacaggatagaatgtctcttgatagtcaataccctctgtttcattgtatcccatagctactaatctagtttgtatctttccaaagaaccattattttgaagtttcaccttgaacacccattttgaaccaatatgtttcttgcccttggggagaggggctaattgccatgttttgatgcggatgcaaagacacttgttctacctgagcctattgacttgatcatggatactctagggtttgaactcaagggaaagaatcaagtcttggcatgtgtggtgacatggcgtggggatggagtaaagaagagtcatagttctgttaggatatgttcttgcttgctacatagaatcgtagttctgttaggattgctatgatattatatctagtagatagattttatagttaattaggataaacatgtgatgatcatgttataataggcatgtgattagaggataggattagcttaattcttatcttgttgttagtttaattcttatcctagttttatgtttatcttagtcgaagttgtagccatataaagggcgttccattcattaataatacttagttttgctttgtgttttaaacatacttcttgattattgtttgcttgtgagctaactaatcaaaccattaaagacttttcaggagttttagtgctaaacatcttaatttcaggagtgattttaagagcgtttagtgatcttgaatcaagaaatatccttgttcttgttcgactaatatcagtggttttgttcgagttcttggagttaatctcttcaagattcttattcaacttgattgttgagcttattggtttagtaatcatatcaagtggtatcagttttccagggaggagaggatagataggattctctttgatcaacaaagatccaagggctatcaacaaggttcaaacattgctgcttgttcaagacttgatctttttctaccaagatgcattctttacgtcacaaggtagtaataacaagattaagagtggtttttacatccaagaatcaatctttcacgtccaagatttcatctttcacgtctaagattcattctttaagatcaagaaagttataacaagcatagaagaacacataaccatggagtccgagatggacaagcttgccaaagctatgcaagcacttgcaaagtcgcaaactgaatcacagagtcgactcaatgagaatactaccacaatcaatgggattggtagtaacatgaataggttggaggcacgcatggatgccattgcaaccatcatacaaaagaagcttgatcggaatagtgccaacttcataggtgccaattcagaggaagagttggcagaacgtgaagaaagatcatccaagactacatacaatgatgatcgtggcttaaagttggatgactataatggagatagcaatcgagaagacttgttacagtggattcgacaacttgagaaggtatgtgattatagaggctttgatgacaagaaaagattcaggattgcctccataagactcacgaaatatgctggaatttggcttgaaagcttcaaggcacaacgagccaagaaaggtaaagaaaagttgtgtagttggacaaagttgaaagttcaagcttaaagagaagttcttgcctagtgactatgaacaaaaatagttcataagactctctactataagccaagacacgcttagtgtacatgagtacaccatggaatttgacaagctagggcttatatttgacatagaggagaaagaacaatggaagattgcaagatacatcaaaggcttgaaccgccacattgccaagaaggtggaagtatccacttatcacacctttgaggatgtgacaaagttggctaagaagtttgaagaacatgagaaggaagagaagcctaagagttcttacacgcctaagtatgatactaatgctaaggccaaggctagcttcctactcaaagtggtatgaaggacctaagaggctaagaacctcaccccacctaaagaagacacaagagttgagaagcctaaagtcgtcgttccaaaggagaaatttgaagagatgagaaagtgcttcaagtgtcaaggaaggagacacatagcaagcaattgtcctaacaaaagagtcctcaccatgagacaatacctagctttgcaagaagaggaggatgtctattagttcgtccctgatgaagagcaaacttaggggaagaagaggaggaggatgcttttgctgaggatgatgcaaggctagtaggggtcaagaggcgcaccttacatgtcgaccatacacctagcatggagcaaatggaaaaatcttttccacactagatgcaaggtaggtgactatatatgtaatggtataatagatagtggttcttgcactaatgttattgtatctgaggtagtgtcaaagctaaacttagctacaagggcacaccctaagccatacaagttgagtttgctagatgatagcactggcatgagagtaaagaaacaagctttgatttcattctctataggggttataaggatgagttatggggtgatgtattgcctatgagtgcatgtcatctcttgcttggaagaccattgcagtttgataaaaaggtcatccatgagggggactctaatgtgtactctgtgttggttggttctaagagggtatgtttgcatcccttagctcctcattcagtggcgccaaagcaaccacctaagacaccaagttactttctatcttcaagggagttcgaacaagaggtggaggaagaaggttgtgcttatgccttgattgtaagacatgctgccacaagtgtcaagactactagcaatgagaagctcgaagccttgatgaaagagtttgaggatgtctttctagaggaactacgacccttgagaggcatagaacatgctgtagaccttgtacctggcgcccctttgcctaacaagcctgcttataagtgtgatccagtggcatctagggaattgcaacgccaaattgaggacctaattgaaaagggctatttaagggagatcatgagtccatgtgttgtgccagctttactagttcctaagaaagatgacacatggaggatgtgcatagatagtagagcagtgaacaacattacagtcaagtaaaggtttcctatgcctagattggaagatatgttggataagttacatggggcatcaatcttttctaagattgatcttcgaagtggctaccaccaaatgaggatcagagaaggtgatgagtggaaaacaacattcaagaccaagcagggattgtatgagtggatggtgatgccatttgccttatgcaatgcgccaagctctttcatgagcttgatgaatgaggtacttcgtccgttccttaacaagtttgtggttgtttacatagatgatatacatatctatagccaaaatgtggaggaacacttgttgaacttgcgtagcttattcatgaagcttagagagcaccaactctatggtaagattgatggcgacgaggttgacgggggattatggcggcagtgaatcaccctctttgccggtcactgaaatacaacctgaggtatctttaaattctgtaattggattgactaacccaaaaactatgaaattgctgggaaaaattgctggatgtgaagttgtggtgatgattgaccctggggcaacccataattttttatcactagctactgttgagaaattagctattcctgtgtcggaatcggaaggatttggggtttctctaggggatggacaggcggtgaggggtagtggaatttgtagaggggtgttattgagtttaaatggtggagttgaagtggaaacagattttcagcctctgggtcttggtaattcggacgtgattttgggtgtacagtggctggagacgttggggacagtggagagcaattggaaaacacaaacaatggggtttgaaatcgagggtgtcaagttcactttgaaggtgacccatcactggcgaggtctcgaatctcactcaaagccatgatacgtaccttatgtaaagagggtggaggtttgtggcttgagttgaaccagattgagcattatcaggagaaaacaccgcattcatcagccttacctgaaattccagttttcttacagagagtccttacccaatttcagtctgtgtttgctacaccagaaggcttaccaccgataagagaacatgaacatgcaatagttcttagagaagggtgtaatccggtaggggtaataccgtaccgttatccacagttccaaaaagatgagatagagcgcctcatcaaagaaatgttggcttccggaatcatcaatccttccacgagccctttctcgagcccggtgatattagtgaagaagaaagatgggtcgtggcggttttgtgtagactatcgggccctcaataaagaaacggtccccgataagtatcccattcccgtgattgatgaattgttggatgagcttcatggggcaacacttttttcaaaactcgacttaagggccgggtatcaccagatccgggttaaggccgaagacactctcaaaacagcttttcgcactcatgaggggcattacgagtttttagtaatgccatttgggttgacaaacgcgccggcaacgtttcaatcccttatgaacgaggtcttcaaaccattcttgcgcaagtttgtcttggtatttttcgacgatatattggtctacagtagttctgccaggaacatgaggagcatttgaccttggtgttgcacaccctagcagctcataaattgtttgtgaatcagaagaaatgtgattttggcaggtcggaagtagcatatatggggcatatcatctctggtcaaggggtggctgtggatatggagaaggttcaagcgatggtggaatggccccttcctaaaaacctccgggaattacggggatttttgggccttacagggtactaccgcaaattcgtacttcactatgctcatatagccaagcctttaactgatcaactcaagagagatgcgtttgggtggtctgaggcagcaactcaagcctttgaaaagctcaagaaggcgatgatcacatcccctgttttggcaatgccggacttccaagagttgtttgtggttgagaccgacgcatccgggtatggtctgggggcagtgttaatgcaaaacaaccgacccattgccttttacagtaagttgttaggtgcccgggctcaattaaagtcgatctacgaaatggagttgatggccatctgcatggcagttcagaattggagatattatctgctgggtcgacatttcctcattcgtacagaccaacagagtttacgtcatctcactcagcagcgagaagtaagtactgccttccaacgttggatgagtaaacttatggggttcgattttgaaatacagtttaagccggggtgtgccaaccgggtagctgatgcattatcccgcaagacagtgggagaggttgaattgggtgcgctgatattaactcatggggtggactggaccgacttggagcgtgaaattgaaggcgatcctctgttgtgcaaaattaaacaagacttccacgggggtgctattactcctgtgcacttttctttggtggacaacaagctgttgttcaagggtcgatacgtgattcccagctcttcggtttttattcctaccttgctgcgagaatatcacgattctcccattggagggcattcgggggacctcaaaacatatctcaggatggctgccgactggtattggaggggcatgcgcaaggatgtggcgcggtatgtgcaacattgtagcgtgtgtcaacaacaaaaaatgtctcaacagatgccagggggggtactacaaccactccccataccttcctcggtttgggatgacttgtcaatggacttcgtggaaggcttgccatcttccaagggggtaaacaccatcctcgtggtggtcgatcgtttgtctaagtacgcccacttcctcccactacgtcatccatttactgctgtgtcggtggcaaatgtgtttgtcaaagaggtggttcgtttgcatgggtttccttcctccattgtttcagatcgggatcgaatttttatgagtgtgttttggcgggaattatttcgtttacatgacaccacactcaaacgaagtaccgcgtatcatcctcaaacggatggtcagtccgaaatcgtcaatcgagctctggagacttatttgcgttgctttgtgggggaatacccgcgctcttgggctcagtggcttgggccgaattttcatataatacttctcctcatctctctaccaaaatgaccccgtcaaggtcctttatggtagagaccctcctactgtgatacgggttaatcggggagcctcacctgttgaaagcttggaaaacatgctccaagagcgagacgcagtattagatgccttgcagattaatctgattaaagctcaacagaaaatgaagagtagtgctgatgctacaagaagagaggtgcattttaaggtgggagatcgagtgtacttaaaattacagccttaccgtcagaaatctttggcttaacgcccttatgagaagttagccgcccgtttctacggaccatttactattttacagaagattgggcaagctgcatacaagttacaacttcctgtttctagcaaggtgcatccggtgtttcatgtctcccaactgaaacaggccgttggttccattcccgtttcagccactattccagagcaattgtcttctgacttggagttagaggtggaacctgatgaactcctcgatgttcgtagtgtttctagaggccagcacacttacttggaagctctcattcagtggcagggattaccatcattcgaagctacctgggaagatgtggctgctttccatcaccattttccatccttccaccttgaggacaaggtgaaactttgggggggtggtaatgtgatgcaccaaactaccactccactactcacctattagaggcgtaagaaaaagggggtaaatcaggaatagtttacaaattctgttgaaaggaatattttgtaattatgatgtcagaggttgttagcaaaaaggcagtagagtaacaataaaaaggggaagggaggagagaagaaggtattgagatttttgtaaggaacttggcccttgggagagttgggagcctctcgaaagctcaccattatcttgtgaatattttccttcctggttatatacaagaaccttcctctgtcaatttcttttctctctaatcttatttcttattctgttttctggttgccattgtttgaagttgcttgttgtgcttgagtaaatacgtgaagtggtgaaacccatctgaattcatcacatctattccaagtggtataatacaagcttgtaatccaaatctaatgagaaatctaagttatgaagaatttcaaaagaactaagtacccttgttttggatgcccaaggatttacttgccgctcaagttaatgctcaacgtgcaagatacaacctctttagtatcccaaggtagtttccataagaattaattgagctcaaatcaagaacaatatttttatgtattaatgtgaacacttcctgaattatattagatatatggtctgaaggttggaagaaagattagcttttaattttaagtttgagatagtttttagaatcgaggaaagattagctcttaacttgtaaactaaggattgctttataagtaaaacattagttatggaactcttaaaattggttttgaacatttctagttaaaaatcccatgtaattctcccaaactagcttaaaatctcacatttcacaagctaaggagagacaaatggcgttctcttgtgaaacaatctaaaattttcattaggctactgttttcaagtatttatatgttagaagtgccgcatataggtacataaaataagtttacaaacacaagtaggaataaggaaaactaaaagagaaacttcagccatacaaaaccggctgaaatcagctactactttctactttctagcttcaaaatctgattgcaagtctcctttaagccaatcaccaatgaaaacctttcctccacatgaagtgtgctcaaatcaagagaagaaacccatcattcgcctatagctacctgggtcagatgaagatacggcaaaaaaaacgctggaaatcagtgaaccaaaataagcaccaattggatgctttctgtccttgctacattttcttctcataggactacttcaagccatacatgaataagcagttagatccagctcctagcatccatttgatcgtacaaatgagctccaaaaagataagtaaaaccaagcagccaaaacctaattaatactaatgatgaattagttgaatagctaatgacgatgaagcaacactttagtaggaatagtgttaattatgatcaatgctacttaatcttctgattaatttttggaaaaatgtcatatctaccttctgtatacacttattcataactatatcgtattattattatttttaaataactaccttttaagtaccaaaacctaagaaatcaggcacttgatggattccatccaaagatccatttggcggggcccactaactgacttttgattttttgcctttcctcttttggttaatctcaatggttcatcaataacaactcaatcttctccccatttcatcaaatcatccctaaatcagaactttttcaaattcacccaaatgaggttatggaaacctctaccaagtttattcgaccacttttagtctagctcaaagttttacacttgcttcaaaaactaagatttattaactttagaaattaggtttttatttttattttttatttaactttgtaacaatcttaaataactcaggtgctttctagagtttggctttaattgtttttcccttggttatgtgaaagaagtatgactactttctccaagactaaagtagagagcaaaaaatgcaattctggaatttcttgcaaaagaaaaggaacgagttaatgataatgaaaaacaaagaaaatgatgagaagagaggagctgaatcaatcatgatcatgtattttaaagttttttttgctattgaagtgacttaagaagaggaaagaggatgagtgaagacaaacaaaagaaaggataaatagagggaaatcttgggcttagaaaggtgaaaaggtaagaagatgagttagtgggccccaacaaatgtatctttggatataatccgtcatgccactgtttggggcttgcttaagtccatacattacttcactaattttacaaaatttattttcttgaccaagaactgaaaaaaccttcagtggtgatctattaggttttggaagttaaaaggtagttatttaaatgtttttaatataaaaggtagttatttagatatttttaatataaaaggtagttatgtgaataaaagtgtatataaaatgtaattttttgacatttttgccttagtttttcttgctaattcaccttttcaacttgaccaagttgctatgaggagaaaacgagcaattattaagcaaatcgcaacactagcattaatccatggcccatgaaactctccataattagagattggattagcacttagtagaacttcttgctcctgctccaggtttccattacttctttatctaagtgcatcaaaaggttgttgggttatgaaaggtggtggttgtgtatagtcattgtcaaaatgttgttaatgcactctatttagaggatgagggattgaatagttttcacctcgtgacctttcattcctttttaaaaaaattgataatgtgtattggtcctatgactgtatgaatggtaataagctatctcatgagctgttactatcttcctcagagtctaggtagaagggtttgggctgataattttctactatgtgcaattagtttgttggatttggatatgctagttgatataggtcctttcccttgggccttctcttaatataggcctacagtgtgattgaagataaatcttctggagaatataagaacaatgagatggattggttagaggttgatttgttcttttggtgtaagactatttcgggttctctattggttatgttcagacgccagaatatgtgttggtgattgttttccatgaacatactttatccgcagagacatttttcttttttcttcctataagattatatttgtttcctctcttggtgctcatctcagtgtctctactttacgttaaactgttgacattacttgacaatgcgtatatttgtcgcatggtgctcttccctcactccacgtcgaccccatacatcaaaaaatgccattaaagaatattcgaactcacaaccttgtgttgaaagaatggaatccctaccaatgactcattaattcattttctctttaagaaataaatgatttcctcacaaacttttaggctttaagagcccaaaagataaaaacataaaataagatagacatcaacgtcaagattagccttaaatgcacaaagcacatgtcaaatgattgataactactcacgagttgcaactctttgggcgttgcctaatattaattggatctcttttaaaaattgttggtggttatggttggtggagaggaccatgtaacttttagctggtcacaactggtaatgattgtcacttttactgcccataaaaaaatttaaactgttgaatatgtttctggcagtggatctgacaaatcctttacaagttggcgtccattttgttttgccatgtgactcaattataatacgtgagttttattatccaccaggtttggctcactaatttccggattaattcaatctaaactgtctccaaagaaggaaaagggtggaggaggaaagccttcttctaatgaaaagacacgcatacgtggttcgttttctttccagggtggaatgcaggtattagcatgtagctttcattctgttaacatttgtggttcttccagacatacatccaatgctttttttttttcttgctataaccataaacattcttgtcatgaacattctttaatactgttgctgagcttagtgtattcgttcattcatgtaatttcctctcttgaggttaaaatggcatacagccttacaacctatatccataatgctccttagagtagaatccctaggttataacatagtaccacttatcaaaataaacatggcacacactgcaggacaagaagtaaatccacctagagaactgagcacctagtagtaaaagcagcgatacattactaataacagtagcagggccataagagtagtaaatgggcctcatttcaacactccccccgtaatggtgagagagaagaagcagtctgaactcccagcttggagagcaaaatagagtgttgctgaacagggagaaccttagtgaaaacatctggcacttgatcttgagatggaacataggtaggctgaataaccccttcttcatttgtattgtccctcaggaaatgacaatctatgtctacatgcttggttttctcatgatgaactagatatgctgctatggcaagagcagcttggttatcacagtagataggagtagcactggactttttaatgcgaagatctttgaggagttgtttgatccacatcacctcacacacagcaagagccatggatctgtactctgcactgaccacaagaaattgcctctttgactttcaagatacggggggagtcaccaaggagcacacaaaaccagatgtagaatttacaacacccatcccattcactatcacaaaatgctgttagttgagcactagacttgttcgccatgagaattcaccctgttggcagcttgaagatgcacattagtggggcagtgcataaatttgcttaaatcatgtatagtgaaggcaatatcaggcattgccttgtaatagtgagataaatgagcttccccatcaatttttgatacacatcaggttgttgaagaggatcaccattgtcagcatagagcttgacatgtgagtccatacgaagcctcaatcgtctgcaatttataaaaccatattcatcaacaagacccatcacatacttctttagagataaaaacgatacttcactacactgatccacttcaatcctcaaaaaatatcttaggccacccatatctttcatgtgaaattggccagcgaagaaactctttgcttcctcaatagttgctaaactattgccagcaagaatgaggtcgtccacatacaccaatatagcactgaaacagtgagagttttgcttgaagaatagagagtagtcacacttggattaagtgaatacattttgctttaaagcagtgttagcttggcaaaccattgcctcaaagcctacttcaagccataaagtgacttaagcagcttgcacaccttagttcatttggtgtcacttctgccatcagtacttagctccccctctccttgaactttgatcctgttacatgtttcactatatcctggtgatagcttcatgtatacactatcctacaattcaccatgcaaaaaagcatttttaacatccatttgtttgcaagaaccaaccctctaaggatgcaacaacaagcatgtggtcatctttgctacaggggtaaaagtctgctcataatctattccatatctctgtctgtcacccatgattacaagccttggcttatgcctattatttgtgccatcagtgctgtattttgttctgatccatccatgtgagggatggctcatttctacaaaatcctagttccgttaggatttgtgttgttttcctaattctagtaggaataggactcctaaaatcctaatcctcctagttctgttaggagtttaaaagttttagtttgattgtaattctagttgtgttagaaatccaaatcctagattcatgtcacgtatggttagaacatggctagtaggataatttgtcttgtgatgtccatagccttggcatttgtggcacctaactttcaatagcttgtcttctgtctccttttctttctccttctttgaggaatcaacgtttttagagctatctaaaccactagcatcaatattaggtttaaaagtgctaaaagatttcgaatagttcttacttgcatacaatttctttttctagtttatgtagcgtcaccagggaacaaaaactcggccgttccgttctggaacggccgctttgtaacggatttcagagaggccgttccgttaaataccgttctagaacggtgatttggaattcacaccaaactcggcgcgatagcgttacgtaacggtgtaacggcgttccagaaccgttacaatcacataacgtccgttatttgaagaagaccagttcttttggtggaggaagaagaagagccaacgcaagatctatagatctgagttaaaatttgaaaataaaacatgtttttttatttaaattaaagcttacagaggatgtagaactcaaattcgagtaaacccctcctttaatttcattaggttactgcaaatcgaaccctaaattgcaaaccctaatttcgaaaaaaccctaatatgcattgggatgcaacgctgcttctccggtcatggcagagaaggtcgacgagtcatcttcggctgcttttagcactgtagctgccggtggttggcttgtttgcaggttagtgcttgctggttttctttctctcataccgatcatcttcttcttttctctcttctctttttcttttttattgtgtgactgccagtcacgtgataattgcaactcataaagtatctctttctctctcttcttttcatccctttttatttttctttcccttttagtttttattccctcacgtggaatcacctaattttcatccttttttatttttttagttacactcttacacagaagtatgttcaaatatcattatagtacctcaaatattgtatttataagagttttggacataatatgatatagaaagtaaaatagaagaaaaataaagtttaaatgtcacttgtgtgatttttttaaaaaaattcacgccgcgacggccgcgaaacgttctatttcccgttacaagccgttcccgcgataacgcgaccgttcccgcgaacgcgaccgcgaccgcgttttttttccttgagcgtcacatcttgcaagcttcttcaaaggtgagttatgtgtacaactccaatttctctccaatcccctccgtcctcatttaggcctccaaggaagctacttaaacattgatcttcaagttcatcaattttccaaagaatggataacttctcgaactcctttatgtaatcttcaacggacatattcccttgtttaagagtagaccattccatgtacaagctttgtttgtagttagaaggaacaaaacgtcctcttaacaactttttaagcttatcccaagtagagattttgggtttattagctttcacacgctgcctctttactccatccaaccaaatagatgcatatttggttaccttaagcacggccaccttgtatttcttttcttttggtgtctcttaatcccaagtagagcttttgcgtgtgaaagctaataaacacaaaatctctacttgggataatcttcttcttgtttccgaaacaactaattcttatggtagttaggaaagcaagaatggtttctaattcaatagggaatatattaattattattagtttaagttaaatagtgcacgaatctaaatagattattcgtctcaaaatctcacttaagtatagatttgtttggacatctgagggaagaagaagagagcgagataaaggagaattatcactcaatgaatccatatcccgagttttcccatttacttctttgaaagcaatatagttcacgaggtcttattatcagtctatggacataagagtaataatttaagggcaaaaactatgactttatgggtttaaactgatacatgttctgttaaactgatagatgttctgtgttaaaccgatactcatatattcctggttaaactgatagatatatgatttaaattgatacccgtctcagtcatgtcttggattgagacggtctgacacaagactttttgtgtattatatatctgattagaataaatttatcctgtttactaattattttatcttctccagacacttgttgacacaatatgcaatcagtttggtaaagatgaactcaaactacagtgcaaggtcctttcattgtcctacagtcataaggggatcccttcttcagaaaattgggtcgtgtcttctgtgtcaaaaaattccattgaagatcaacaatatgatgctgtcatcgttaccgtgagttttactttgcttactgctattgcaccaatctttcttcttttgacacactgataatggcaatgctgttgtggtttgaagccatgttatggggttttagggatatttatggagtctgatctaatatgttattggataaaattcagatctgtaacgtgactcaatgagattgaaaaaaattgaatcaagataatggattggaaaattaggagctaacctagggtctataagcgatccacttggagtctcataccaagcaggtattcgacattttaggtttatattgctgctatggctcatatgggagcctacatagggtctggtgcttattcctttttcttttgtctagttttggggctgcacatttctgttgtgttttgatatggatagccatcacctgcaattgcatggaggctgaactaagttctataggggagcaaacagtatctgttggaaatttattttcatattgtgtttttaaatgctataatccaaaatttgttgttcccctaaaatgcctaaaatacccttatgtaactgctccatctgtcccttaatagacttcccatttctccaatgcatgtttgccaatacacattttgtattgttaatatcaaaaattacatattagtaaaaattataaaagtttgattttcctaatgtacgcaatgagacgaatcaaacaagacgccatatgactatgttttttcttatacttcctatgttttttaataagtgacatgttttccttttagggaaatgtcacaataagtgacacatagctcaaagtagtaaaaatacttctcatttattacatctttgccattatttaattgtttcacctacctactttatccaatactcaaatttgattggttgaacaattggtcccaactttctctagactccttggtattccctttcccccactttctctctgtgtcacttattaaaaaatggaggacgtatattggaaaaaaattggaaggttttcttcacttatgaatagtggtaaaattagagatgggaaggctattttgggatggatggagtaatatttaaatttttaaaataatgtcattgttttagtgatgaaataaaattcaaggctattttttctagtaattatgttatctgtacatcaccacacgtatcgcgtgcatataagactagtttgatgatattccaacactgttcgaaggaagtcaggcatggaaccatgtttgcttccatatgggaaatattttgcttactctccttcaaacatctacctcattatcccagaatgattgatcgaatctaatacaaatatacaattgatcatatgccaccagggaattacatcaaattaaatttttatagaaggggaatcagtcatagcctcatagggaacgaataagtgatactcgccagtttctttcctggttacttttcctcttctcactagccatcctttatgtatgggtatgctgcatcattcctgccactggttgggactcccgtttgaactatggggggatgggaaagctaagccatcatcttcaaattgagtttcttgagaatgtaagacaccatctgtaagatgaatatagtgcactctatagtcaatgtcatgatctttatgggtttatctgctgaaataactgtgatatacccagctctccatttacaaagttttcctacatattaaactcttgcccgcaattctagaacttcattgtagaacttttcctacataagcatcatttgtcttttctgtagtaaaagttagaaagagctttattttagaacattcgtttttagttttctttgttgttgattactccgccacttttaatacttttatgattcaagtatttgacaaaatcatgtaatttaggtcctctgctgcatgcagtctataccctctctctctctctctctctctctctctctgtggttgtgtcttacttgttgagttactaactccagccattacataaagtaggctggcattatgatgagcaaattactcaagaccacatgttagctcctttttcttttctccttattctgaaaggcaaatataggtccatcttggtgcttctcatgtcataagtaagctgaccccctccttttccagggaataggacaataatccaaaagtgagggttttacatgttgggatttgtgaagtttcttattttacttaatagccgagtcagtgttacaatacatagtaccgtgttacaaaatagtatgtaacaccaagcatgtttatgtgcaaaattgtgcaagactttgttgctggcacgccaagggctgttttaatgtagtttacttattcttttaggtttttcagatgacaatcataaagggaattaggagtgtttttattgtagtcaatccctattgtgctacaacgataaaagaaaaaagcacaagactagaaggagaagtaatgtctaggaaagactcctcacctggggttgctagtcacctacacatcttagaaggcatcaaaccaaagcttattcccctcgactgttttcgggagaaaagaagacaaaattgtttctaacttatactttaccagtttcactacagcatcagaaagaagcaaaatatgctcccacaacacggcgaacctagctttccagatgtgataaaccagaccagcaaaatgattattttcactagagctttgagtctattttttcggtttttccccttcttcctggtaatgtcacgccaccaagccatcatctcaattttttgagatttgacgtaatcgctcaaatagctgagtaagacacttcttgctctaaatactaataaaaaagaggtgaatgtgggtctcagccatgttactcaaatcggataaagtgtctactcttattagggtttttgggtgttggactcatccatttttttttgtaaaatgtcaagattttggtttgaaatgagagattcaagtgtcgtgacatgagtcggcacgcaacacttaaacgtgtcgaagtaacagagggtctcagacaatcaactttaatcaatcacgaaccccaaaatttatgcaacctttgctcatattcagtctctgtaaagcactcaactgcagcacacccacccattcgcttcacctacagcaggagggcacccaagtaattgctatgatgagcgaattattctgttttgccttgctggaatattgctgttagatttgctgactcactggcagttaattatagtcagagaatgagaaatatcctgtagagagagaaagggtatcttttgtatttagctctataaatagctaaggaagggaagggcattgagagtttatgatattataataggagagatttagcctctcgaatgctgataggagcgtagctcttgttggattatcaatactactctgtttgctctatctatttctactcaggttccttcttgtacagtggatccctgattggatttacttcatcaaccagcagataaaattatttgtaggcacattgaaaccattccaaacctaatgaggccaaagtttatcacaaagaatataggagccaaatgtaggcaacagataagagtataattgccagaagttgaagactccaggtattgttcagaaaccttaatgcatatcatcattctgacactagattttccccggagccaactaacaaaaatgaattaaagagattaaggctatgtttagttcacctgaaattttctgatctgaacttatctgatctgatctgaacttattttttctgatctgatctgatctgatctgaaccaatctgattacaagatcttatcttttagatttttctcaatatataagaaaaaatatagtcatgtggggtcttgtttgattcgtctcaatgagtactttattaatattcaattattataatttttactaatatgtaatgaaagatataatgatttttaaatataagcatgatctgaactgatctgatgtgaacttattttttctgatctgatctgatctgattagatctgaaataagcaaaaataaggtgaactgaacatagcctaagcaacaattgagggaaaataagatcattatggctaagataagataaatatgtaatgataaaatcagagtaattatatcagttacactctcaacattcgtcagattgaggtttcctcccaaaatgccaacccacttttctgtattttcacgtccttctctctacccttctaggtatatattacatcagctgtaaaatttttgaaccaactagtagaatactgatctaccctcaactgcctcactttctcattttttctgggcctttttctctctagcacaagtccacataagtgatgcatagcagaaatataattccactagtcatcctcaatattgatataacaaacacatcacccacatattatcatttttaatcgctgcatgcgaggcatacttacccaccaatcaggatatgcataacagcgttcctaattccaaaaccaccatatatcttgggtttgcaactctcatccctagcaacaaggggactttctgaaaaagtggcagattccgcccacaagtagtttgtacggacacctttattatattattaatatcatatttcggcaacacaaattaccagcccagtaaaacatgaattgacatgagactaacaaggggcccaatctaatatcgtacgtctgtactaagcaatgtataaaaaaaagctcaaggtgcattgatgcaatagggatcctaatgtgcataggtgcgcctcattgaagtgaggcaccactaaggataaataaaaaagattgatgtaaaattaaattgtgcaccttgggtgcgcctcgatgaactttttttgtgtgcctaagtgtacctcaagtacgcctcattgatatcgcctcgcctggcagaaaacgagcttgaccccaatcgccttgctccccaccgcctaggcgtgcctcagtcacactttttaaatacattggtattaagtactcagaatggcaaaaagaaactttgggcattaattagacatttcactttttgtgcaactatttgtgacttcagagattgatatgttttctacattacagacttttgtgatggctgcatggtctccactgtcaaagaacattagtttaagtagaagaaatattgctctattaccttcctccctctacaaacaaaatcctaaaatgtggttatgtagtgccaattcaaacttgtagatgcatgactaatgctttcattatgctgtgggtttttatactatgattcatgtccaattacataacaattagctggagtcaggatatgtcacggaaattttaagcctggcaggatgattgtttatattttctctttttcggtgtttaagtcaaagtaaacttctaggctgctcttttataggctagttgggctgttggggagatctacacattaagtgtgaagaaatcttgtctaactccagtttggttgagaactgtaagctgtcataacatttgttgcatgatgaggccttgtgggattatcatgttagctgtaaactctaaacttacttgaaatctagtgttgtgtctccttatttctgtagtcaaaattgaaccttctgtacgtttttgatacctgcgactagaatgatggaattctgaattactgatactattacaaccatctgctaagaacgaagatgactcttagctaatttctcagcagatttagagaaattaagaagaattactaatgaatatttaaagagaaaactaccaagatatgattgtattgatgaaaaacaccaattacaacctaaccaacattcgagaggttggagctctcccaagtaaccatttctctcactaaacttatcaattttcaagatgccttttccattctcagttcctctatatttatactactccccttagcaaactacccaacttattccccaagtaaactaaagagataatatctaaaatacccttccccctacaataatattagttcttagcattaccggccccctaaacttccaccttgtcctcaaggtgggtcgtaatcatcactaaattctgggcctctactcgtatattcagtgtcttgcagcccttcaggccccaagcctaggttatgcagctcgtgttgcggctcctcctcatatagttctctggctggagtgagtgcctcaactataatgaaaaagtcctggaggtggggaaggaaggagtgtctgaaatggtgtggtgtgctgctggtgttatgggcttgtgcctgaaagttttgggtttaaagagatggagtggagaagagtggagaagtgactggagacgtaaaagaaggaatcataatttttgtaagtggtgggttgaaaaagttggtgggaagaattgtttttataaaatgtagtgtaatggtcgaaaaatgggtggagtaagtatggtttttggctggggatgtggtactgggttgaaaataaataggtctgagcttacttgtaaaattggcctcaacatgagcaggcccaatatcttgagccaattccccaaaagctggcaatagagcactcttaattgcattgttgtgggccatcgggctccaaacatatattcggaggagccggacttctttggtgatgtcattagcttggcccattgcacactttcccttaacagcctcaagatcttttcccacttttgtaccccaaccacgtggcttcaccatcctttctttcttgcttttgtcacttttttggcaatatacgagtttgtccttactaccctcatcttctaatgttggcttcctcaccaagcttaatttctggaattttgtccaccaaatcccaccacccatcgtcaacaccatacctatctacaccggccaagaagcctggtcctccacccgaattttcgccacagacaaagcctgaacaaccgtcagttctctcaccggagaagttcacaggtccaccacctgacccactagttgctgatccacccttcacaaatctccctcctctggctgccacaagtagtggttcctccgtaatactcatatttctcgtccaagagccctggaccaccaccggacccacttccaccggcaccaacttgttcaaatgatacttctctttcttttccaaacagcctacttggactggaaaaaccactgcgattgtagcctccgccagatctgtagcctagtgcacctaacgtgcttccaactgcaacccaatagggatggaaatggatgggattcggggagggtggagcatcacccgcatccgtcacccgcatccattcgctccacccgctccacccgcatccatccatccgtcacccacgggtgaaacgggtgggtcggtgataaacgggtggaaccatttagggggtgtttggtatcatgtttttttacaaaagaaacagaatcaagtaacaaaatccgtttctacttgtttggttctatgttgctcagactcgagtacccatgtccgacacgggtacgtgtccaagtgtccaactcagctattttctagaattttttatattttttaacccaaaacaaagtgtccaagtgtcccacccatgtccgactcccgaggatccgacacgggtacttgaggtgaaatgaagagtccgagcaacggaggtttggttagtgtgtaaagtaacaattaccgttacttgaggaaaacacatccccccaagttgtttccattcaaaaacctaaggaaacaaataacgtttcactcctcaaacaagaggaaagggaatgggttatatttatttccattccattaggataccaaacaactaataagggtaacacttattattatcctttcccctccttatcaaaatcctttccattccgtttacggtattcataccaaacacccccttagtatattttctaatgaaatttgtgatatgatatgcatgatataaaataattctatcaaaaatataaaaagtaagtaaacttacatgtacaacttaatagatgggtgatgggttggaggttaaacgagtgatggatcgggtgacgggtgaagaaattctcacccaccactcgctttccatccatttaaattaggtttttcatccatttaaaaaaccgggttaaacaggtgatgtatgatccatcacccatttccatcctcaaacacatcccgatttgtttactgcaccaccagatccaccagtataaccacccgaaaaatcatcatgccttctactagccttgtaacctgctcccggtgagaagcttcttccacaagtggtggtcgctggacctccatctccttcttccccaaaaaattttccatgacacccactcgacccttcatctgtgacaacctcttcttcgtccacctctgaagttttggggtcgtcttcctcctcaagctcctcttgaagtaactttaacttccgttggatgggagagaacgcttcattgattatcttcaccagatcttcttgaagtttctcgaaactttttctcacgttttcctctacctctttcgtgatttcctttccgatctccttcatttttagactaggagctcttgcgattccatggcagatttctttttttaaaacaagaaaatcaggcacttaatctcccagaatagtggtgctctgataccattttctaagaaccaagatgactcttagctaatttctcagcataacaacaaatttagagaaattaagaagaattactaatgaatatttaaagagaaaactactaagatatgattgtattgatgaaaaacaccgattacaacctaaccaagaggttggagctctcccaagtaaccatttctctcactaaacttatcaattttcaagatgccgtttactactccccttagcaaactacccaacttattccccaataaactaaagagataatatctaaaatacccttccccctacaatattagttcttagcaccatcaaactgggatggatggttttgtaaggttccaatttacttctccatcaaaatattttaggattttttatctcatgtattttagagtttcctcgtccctttttatctgataagattcttctgatgatttgattttatggtaggctccaatcagcaatattaaagaactgaagattctgaaagctggagttccattttcacttgacttcattccagaggtttgtatttttatagtggttagacatgcttcccctagttttcaaagtaaaagcatccttgttgtgacgatattttttcccttgtttttgtttttattattatcatcacttatttccattttctattttccatgctgataagatgttcatcaccataatcttgtggtatcagaagtgtttagtggagtttattcactacacatgcagttgttcttttgccatgaccgccattcattttctcgtcaaaacaaatctatgaagtttggttttcagactcatggttcttgtagctcttgtgaatttttttttcttctccttgcatgcattcttcaaattacatattgcatataccaggtgctctcctttattttatatttaatttttaaaattctatcatatattttttaatgtcaaacctcaaactaggggttcactgcatcttaggcttaccaggctaatatttctttacttaaccttttccctttatatttgctatcctcttgtgtagtaatcaccataagaagggtacaaactaaattaccctcccattcttttgtatcattctgaaatagtgtcacagagctttgatttttttgccctcatttaatctggcaaatgttctctctatttttttttttttactttcttttgacgggattctcaggcaattgttacggggagcagccagtcacactgtttctgtttattatgcaggtgagttacctgcccctctctgttatgattactgcgtttaagaagaccagcgttacaagacctcttgagggcttcggagttcttatcccttcgaatgagcaacataatggactgaagactctcggtaattgtctggttcacgtgtgtagcgaatcagattttcaaaccctgatttcgtaacattgcaggtactctgttttcatctatgatgtttccagatcgtgctttctccgatatgtatctctatactacctttgttggaggaagcagaaatagagaacttgcaaaagcttcaacgtatgagatatgcaatgttttaaatgtatgctatagtcatcgtttcaaccttttggtgcctttttcttactaatttatcctcctggtttaatgatcttagggatgaattggagcaaatagtttcgtctgatctccaccagctgttgggcactgagggaaaacctacttttgtgaagtattgatatctttcacccaacttaacatgatttgtgcttataatatgttaaataaagtaactgaaatcctgaaattaagactacgaaactgtatggtgacagtcatttttactggaacaatgcattccctttatatgggcacaattacgactcagttctgagagcaatagaaaagatggaaagagatcttcctggacttttttacgcaggtaatctgtcatttgcttgttgcgataaagttcatgtacagttggcatatcaatcaacttgcattctttcttgctaactccaaacaatcaggatcattaacttgtaggctgcagcaacagagagtatctcccaagttgttaggtttcatgtaacctcgtcgctgagatgaaatttccgttggctaaaaagtgaaagttttgtattgatgttacccaaaacaaaagtattttgcatgttgcttgaagttttggttgtttcagatagtacatcctttgacatgaaaataaatggaaaagcgtatgtcaagcaattatcatctagtttctttgtttctagatactagccgcatttgatcccagatcatttttgaggaagtcagctgaaataccgtagctatccttcagttttcataataaaactttaatggatctgatgtacagtaatttagtgtgcaccgggttaataattgatattaacttcatatagtgagtcttataaagatataatgaacttatatacaatatagtggattttattaatggaaaacatatagtgaaactatatgcaatatagtatgatacataaagacttagacaacaagagcattcgaaattacaaagaacaaaggaaagaacaattgtatcaaaccggttcgaatgaacaaacaaccaccacttccacaatcaatgtaccaccaatcaagactaaactataacaatgagcttctagtttaagtctactttgagttttaatcaccaattcaacgattagatgatcaaaattgcaaaggttaagagttggtcaaacctaaccaagagttacactaggcacatagctttgttaggagtatattagtttatgaattctagttaagttagaaatccaatacctagttggattaggattcctaattggattagaattatagtttagttagaattctagtaatagtaggcgtgtgattaggagatataattagcttaattcttatattgttagtttaattcttatcctcgttttaggtttatctttagtcgaacttgtaccctatataaggggcctttatttcattaataatatagtttattttgagtttaaacctttacttgtgattgtttgcttgagaggttattaatcgaaccattaataacttttcaggattgttaagtttttagtgttaaacatcttaatttcaggagtgattttaagagtgtttagattcttgtattcaagtttcaggactgatcttgaatcaagaaatatccctagtttcgactaatatcataagtagttcgaattcttggagtcttttcttcaagattcatattcataacttgattatttagacttcttggttttgtaatcatatcaagtggtatcagttttccagggaggagaggatacaaagggttctctttgatcaaagaagatccaagggcatcaataagaatgacacttgcaataagttcgagtgatacaaacaacttcaagactcgatcttttgctaccaagaaccaatcttgacgcctgaagattgttaggacaaaggataagaagtgtttctacatccaagattgcattctttacgtccaagattgcgtcaagatccattctttaagttcaagaaaggagtagaaagcattcgaacactacttaaacatgacatccgagatggataagctggctatggccatgagtgccttggcacaatcacaaactgagtcacgcaaccacatgggtaggatggaggcacgtgaccgtggattgaaactagatgactatagtggagatggcaatccagaagacttgttggagtggatttgccaactaggcaaagtgagtgattataggggctttgatcacaagaagagattcaaggttgcttccattaggctcacgaagtatgctggaatacggctcgaaggattgcatgcacaaacttcttgcctaatgactatgaacaaaaacagttcataaggctcgcatcaataagccaaaacacacttagtgtacacgaatacagcatggagtttgacaaattagggcttatatgtgacatagaagagaaagagcaatacaagattgcaatgtacattaaagggttgaatcgatatatagccaagaagatcgaagtctcaacttatcacttctttgaggatgtgactaaattggctaagaaattcgaagagcatgacaaagaagaagggcctaagagttcttacacacctaagtatgactctagtgctaaagggaaatcaacagttccctactcaaggtggtcggaaagacctaagaaccccactacacctaaggaggacactagcatggagaagacaaaagtggccgtacctaaggagagtttaattttgtgttttatacatctttgcttaagagcttaacaattgaaactattaataacttttcaggatggttaagtttttagtgttaaacatcttaatttcaggagtgattttaagagtatttagattcttgtattcaagtttcaggagtgatcttgaatcaagaaatatccccttgttcaactattataattgatcttattcgagttcttggagttaatttcttcaagattcatattcatacttgattattagacttcttggtttagtaatcatatcaatatcattagcattaatttacccccagggagattaagaaaggattagcctaatcaaggcgcttaagaagtttttaggaaaaatcgtgcttgttaagcttaagaattgaacttctttcaccatttgcccttgattctcttgttgaactagaagatcttggttcatagtagatgctcctgcatcatagtagagcatttaattttaattttttaacatgcacgaagatgtaggtagtgtagtatatatcgtgagacgtggtttaacatatagaaagatgtagtttctgcatgatatagtgagtttttgcatgatatagtgaatgtctgaatgatacagtggatcgttccgaattgttgtagtttgtatgatatagtatttttgtgaatgatatagtgagtttcttcatgatacaatgggtttctgaatgatatagtggattgcttagaaatgatatagtgagcttttgtatcatgtagtaggtttctatgtgatataggttgttaaaagatgatacatgcttttggcctcatgtactctaatgttaacgtgaacccggtccttgcaagtcaattgcagttttttcaatattaagctatttttttttttttttttttttttttttttttttttttgtacgggaatatttagcatctttaccacaaacataaccatacgaatattatgcggaaattccagtctgaagtcttaacttttcaaaattaaaagcttctatattatttttggaatgaaaaaaaatgagctatggcatgttattttgaaatacaatgagtctcaaggtgcatagtggcttcaattctacgaataatgaatggactactgatttctaattttttgttccgggcttttgcattaggtaaccataaagatggactctctgtgggaagaactatttcctctggatacaaagctgcggagcttgtgatatcctatctcaactctacttaagatgcctaaatgatcgaggagactccgtaagtcctttctctgattctatctttgaactgagtggaaacacgactgtggtctaaagtagttgatgtctcagatatccagaaatggcgttagtgatattcaggagctgtccattgaccctttgattcattgttgcagtttactgaaagttgttagctggtctcagaaaaacgaaaggaaaaaagggggaaaacaaaaacaaagaaacgtagattgtggtgttaaaatcaagaattccagagatttgtaccttctttatcagttgaattgtttacagtgtgaatcaagaagttagctcgaccttcttttcttgtgaatggtaagatttcgtgatcatcaatacttgattgtgctgtttgcaacttcaacggtaagatttcctgatcttacagtttaattgcttgtgctgtttgccactt

SEQ ID NO: 98 - DNA, 1572 bp, synthetic construct
  source 1..1572: mol_type = other DNA
atggtaatgctatacgattctcacctctcaggagtctcaactcatcttcaactatcgcaggcatttcccaggaagaacccattaatggccaaagtgtctgagccgggtaaacccacttctgctaaaaggattgctgttgttggtgctggtgttagtggacttgctgccgcatataagctaaagtcccatggcttgagtgtgacattgtttgaagctgatactagagctggaggaaaactcaaaactgttgcaaaggatggtttgatttgggatgagggggcaaatactatgatagagagtgaagcggaggtcacgagtttactcgatgatcttgggcttcgtgagaagcagcagtttccaattgcacaaaacaaaagatacattgcgagagacggtcgtcctgtgctgataccttcgagtcccattgcacttctcaagagcaatatcctttcagcgcaatctaagctacaacttatgttggagccattcctttggagaaaacgctatgcttctaagatttctgatgagcatgctcaggaaagtgtgggtgagttttttgagcgacattttgggaaagagtttgttgattatctaattgatccttttgtcgcgggtacaagtggagatcctcaatccctttctatgcgtcatgcatttccagaagtatggaatattgagaacaagtttggctcactaatttccggattaattcaatctaaactgtctccaaagaaggaaaagggtggaggaggaaagccttcttctaatgaaaagacacgcatacgtggttcgttttctttccagggtggaatgcagacacttgttgacacaatatgcaatcagtttggtaaagatgaactcaaactacagtgcaaggtcctttcattgtcctacagtcataaggggatcccttcttcagaaaattgggtcgtgtcttctgtgtcaaaaaattccattgaagatcaacaatatgatgctgtcatcgttaccgctccaatcagcaatattaaagaactgaagattctgaaagctggagttccattttcacttgacttcattccagaggtgagttacctgcccctctctgttatgattactgcgtttaagaagaccagcgttacaagacctcttgagggcttcggagttcttatcccttcgaatgagcaacataatggactgaagactctcggtactctgttttcatctatgatgtttccagatcgtgctttctccgatatgtatctctatactacctttgttggaggaagcagaaatagagaacttgcaaaagcttcaacggatgaattggagcaaatagtttcgtctgatctccaccagctgttgggcactgagggaaaacctacttttgtgaatcatttttactggaacaatgcattccctttatatgggcacaattacgactcagttctgagagcaatagaaaagatggaaagagatcttcctggacttttttacgcaggtaaccataaagatggactctctgtgggaagaactatttcctctggatacaaagctgcggagcttgtgatatcctatctcaactctacttaa

SEQ ID NO: 99 - DNA, 37009 bp, synthetic construct
  source 1..37009: mol_type = other DNA
tattccatcgaatgtagcaaattgactgtccgttgcaatttcggagtttccactcgtcgcatggtaaatggtaatgctatacgattctcacctctcaggagtctcaactcatcttcaactatcgcaggcatttcccaggaagaacccattaatggccaaagtgtctgagccgggtaaacccagtaagtcaaacattcgaatcacaactcaagcaaatttgtcttgtttgcgttatattttgctcatttcagccttttttgtttttccgacctttgcatactgaatattgtgtgtgtgtgtgtgtggggtttcagcttctgctaaaaggattgctgttgttggtgctggtgttaggtaaattttcgtctcttgcagagtttttgagtcatttgggaattctatgtgaaacttgtaactcccttcagtccaacgaacgcagtacaattttctatcaaatcatggtcctaatttccaattttccatatatattgttggaattatattgggattgtctatcactattaatagtattaggatcaattgtagagaagcacagaaatttttgggatcgaaagaatatctggattgccacattaacagcagatataattcttccaattggtttttggttcttcctaccttgacttgtctggtcaaacattataaactttaacctttaatatccattaaagtaaactataggatttttttgtctaaaacatgcttatataacatgaaatttgtgagaaaccaccttatatatatttttttgcgaaaacaaaccttaaacaaaattattatcgtgagaacaaaccttatgccaatttcgatcattgacccaaggttttggcattgaccgtgtcatgaattttgttgggtttaaaaagtcatgtgtcttgcatacgaaatggtaaatgcgggaaccttgggtcaatgtttggaatccgcataaggtttgttctcccaaaaaatgtttttgttcaaggtttgtttttgcaaaaaaacttatataaggtgctttctcagaaatttcatgttttataaagtagtatttgacaaaaaaccctaaaatatattatagaattattattgactaaattgtgtaaaaatgtactcttctaaaagtacattatagtattttagtggaacatttgcgagaaactactttataaatacgatttttgcgagaaatttcctaataaaaaaatgtgaagtgcaaaactatcttattgataattttctactccctcaaatccaaaatactatgaagtctttcctttctggtttgtcccagattagtttgtacgcttccatctttggtatgatcccacttttattatacttattagttttacgtgagttccttactctatctcttttaacaaaaatactcaactatctctatccaataaaaagttccttactagtcctatcacatctgctttttaataaaataacgtttgataaccacacaacttatatccttaaaatacacgttcaaccaagtgttgagattaatttggacggagggaataaatattttttgaggcatattggtagcagtattcggattccgataggttgactatgtttccaatgttgaccaacacttgccttgcatgtaattctaactttgctcttttttattcttcatttccctcgtattccatatacaatgtttagagacccattccttcctcttctcttctttcccttccttactatgctttgccataatcttcctcaaatgagtgcaaattaatttgtcgttgatgtaggccaactgattgtagcacatcttcatagttcatacctcaacacactcgtaattatattataccctacatgttaaatggctcatgaagctttattttatatcatacttcctccgtttcacaataagtgtaacacttttcttatttggaataatcacaataagtgaaaccaagctccaaatggtaagaaaagttcactcttattacaaatataccaccaaaaagtaagaggggatcacaacttcaatacttcttcactctactttattgtggtcccaactttctctctctaaattccttggtaactccccactttctctatgtttcacttatggtgaaatggaggaagtattttgtagtggtatttagctactaggccttggatgatatacaatcatacaatgtatttatattcacgataatttgctgcccaccttgattaccatgatttccaccaattttatcaatttcagtacttcaccaccccgaatttatattttttatttccaaccttggtatctccatttgtctgagtgcccgatccatttgtatcgcctccagaattgaagaagcttcctgcagctagacaattaggaaggttaaaaaagtttggagatggtggaggatagccataataatcattgttgggaggtggaacttggaaggttattgtagggttgaagtccttgatgaagaagaattgagttcaaatgagaggaaaaaggagcagggaagagggacaataagaaaaaaaagggtaaactaaaatcacgtgtaaggcatgtgcagatcaacatcagaaagcatagtcaacctactggtattagggcactgatacctttttgggtcaaaatttttttacaaggtatttcatgaggtagttttgtccatttttttttttacaaggtatcgtctcattttttttttatcatttagtttctcgcaataagtgtatttcatgaggtagttttttccaaaatttcctcatttattataaaatacctcatcttttccataaataatgcaatgtctagacttttacgctgtttacacatgctcctttgaccatctattgacacacaaggaaaaatagagtagagtcatgcaggatcttgttagatttttctcgatatatactttcaaaagatcaatttttttataattttttttttgaggggattttttttttataattatgtacttatcaaaggtcaaagttgtgcaccgggaagcataaaactctatgtgttgcaatttacatggaaggggaggagtataataagagaaaattatggtaaaaggttcattcctggagatcatgagaaaggaagtagaaagaacaaaaaagaacaatgggagtgcttttcaatgtttgttgtacgtagcatttattcatttgctataatgttttgtgacattgtagtggacttgctgccgcatataagctaaagtcccatggcttgagtgtgacattgtttgaagctgatactagagctggaggaaaactcaaaactgttgcaaaggatggtttgatttgggatgagggggcaaatactatggtaatgtttttgattattgcaggtcttgcactttagcgcacaattaatttctggatttttttttgtactgtggtggttatggtcatcaacatgtctcacccactgtgcttgcagatagagagtgaagcggaggtcacgagtttactcgatgatcttgggcttcgtgagaagcagcagtttgtaagtctttcattatctgaatggcacatactttatttcgaaagattgtaattgccttttctttctagatggcttcatcttcatgttgctttctgattcagtttcgtggctaactttccaagtttgtctgattgctaactctgtcatagccaattgcacaaaacaaaagatacattgcgagagacggtcgtcctgtgctggtaagtttgcttgttttacttttgacctcttttaagatctttcaactctggagcctggaaacatggtgatgcaggaggcaagttctctctattttacatcctttcttctctgtatcttatgacatttgcctcttattctgtgcagataccttcgagtcccattgcacttctcaagagcaatatcctttcagcgcaatctaaggtcgttttatgttaagacatacttgatgctgagagtttattgaattcttaaccttcttcttattttttttttatttttttagcaaaaggtaagtatattgcatttaccaaaaaacagtatgtacaccaccacagcagccatgtcagaatctagaaataccaccgaaaaaatcctacacccaaccagagacagttatattatatcctactcctaagtttctgtacccaatttacatcaatattggtccatttacaagatatttttataattcacagaagcacatcagttttaattagtttaataatgacctctggatgaataaccaactcagaccatatagccttattcctggctttccggaagttgtacgccagagcagcaagcacagcaatgcaaacctgtttcttatacctccttttatgtgtcttagcccatctcttatagctagtgaagatacagtcgtgtgcacaggattgaaccccaatccaactagcgaaagcctcacaacattatgactataaatacatctgaagtataaatgctgcacctttttctcctcttgcctgcacggtatcagaacaaatcccagctttagctaacaattccctggttttcagtttattcaatgccatcatgcaagcaatgaaagaatgttttggaacattcagtttgttccaaacacagtgagagcaagggacctttcctgcagttccacttagccacttatatccctgactaatagtatgactctttgcaccgtaaattgatttcaacttaactttttcataagcagtgaattgtgtgttgttagagtgtctagctgtctaggagattgggagaaaaggagggaccaaggagatagaaacacacctttgtgtttctttgtgtatttactttttagggtgggtcacgttttctgagaaatttgggaaaaggaagaaatagtaacacactttcccatttgtataacctgtatactggagctccaatataatttgcatttttttttgagctgcaagaatatgttgacaaacagttattgcttcttcctcagctacaacttatgttggagccattcctttggagaaaacgctatgcttctaagatttctgatgagcatgctcaggaaaggtaatgtcaagacatgtgttacctcgccttaattttcgttccaggaggtgagcatgcatttagaactaaaaggcacaaagactgttggtggtcttgcctgttcaaatataatggagaggagttttcgctacatttaccctctcttgaagtggggttgaaatatagcatcaagttgaatgcttgattaagtttaaaggacttgtgtaactctttttctgtttactgtgattacatgacctggttgattaacataatggtctgtttatctgtagtgtgggtgagttttttgagcgacattttgggaaagaggtaatggtttaccatagtatttctgctttagtggtaaattgtaatgttgctgataattatacttcgctgcagtttgttgattatctaattgatccttttgtcgcgggtacaagtggaggagatcctcagtctctttctgtaagtgaacattttgtgcttcactcccaattttttggaggctggaaatagattcttttccagttgttctgtcaaaaatagatgtagctttattttgaatttgaagttcccaattgttcattttgactattactgattattgctaagagtggcattatgctattatgctcctaaaagaaaggtgaattttgacctacatatagtataatgtatcaatattggtttaattgtttgttcttttgttccttttggtgctcatcttgcgccttgttctcatcgctcgttttttcatgttgcacttgatttaaatttgctcagcttaacttgtctttttgaatttatattacttattgctatattttactaatttcgttgaaactaattttttgctgaacttttcgttttgttgaaatcatttttctgaattaacttgattttcctgaatagaattgaattttggtgatcttaccttttctgcagccttttatttctttcttgtcctttttccaatctcatttttttatatttccattgtgttgacatcttatcattaactgtgcagatgcgtcatgcatttccagaagtatggaatattgagaacaagtatggaccataagacgtttattttaatcgacatgtatgtttcttagtttatacatatattaattctgtggtaaaaaaaccgaacaagaatatctttttttttttctatcatcaaaaagggtgaatatatgtagaggaaaaagatttgaatcaagatattagcctaaagcaataataatgttagtaatagctttaataacaaattcaaaacgtacattaatgaaccgagaggccggaaaatagttaaagtgaccactaagagaagcgaaggattcatgatgggttttcaacccagtagggcaaatttgttcaatgttctttacaaatcaagcttattaccttgtgggtgtttttgctagagatgaatgatagaattttccctagttggaagtcttttttggttactttatgggagctagtgatgtaatttgtttcgccttatggcatttcctaacatgtgcttttgtgatgtattgaagctttttttttgccttaatttatgctggattttaattttgttctttgtttcatttttcttgcttttgaaaaaaatatatagatatgtatatattaggattggtcgaggattttgagggaagggaaagacctaagaaaacttggatgagggtgattgatagtgatatgagtctatttgggatcgaagaaaatattcctttggataaggtgtagtggagggttgagggagcaaatttatgcagattagcttgacttaaagtttttctttttgattatttttcatttacttgtgttttgcaaacatttactcatgaatgatgtaaacttcttcaaccaaatctctggaaaaaaataatctacatggaaaaaacattattaatgttaacttgacagagatcccatccttgtgaagcagctagcaattaggcatctaacaattgacattttaatggacaggatagaatgtctcttgatagtcaataccctctgtttcattgtatcccatagctactaatctagtttgtatctttccaaagaaccattattttgaagtttcaccttgaacacccattttgaaccaatatgtttcttgcccttggggagaggggctaattgccatgttttgatgcggatgcaaagacacttgttctacctgagcctattgacttgatcatggatactctagggtttgaactcaagggaaagaatcaagtcttggcatgtgtggtgacatggcgtggggatggagtaaagaagagtcatagttctgttaggatatgttcttgcttgctacatagaatcgtagttctgttaggattgctatgatattatatctagtagatagattttatagttaattaggataaacatgtgatgatcatgttataataggcatgtgattagaggataggattagcttaattcttatcttgttgttagtttaattcttatcctagttttatgtttatcttagtcgaagttgtagccatataaagggcgttccattcattaataatacttagttttgctttgtgttttaaacatacttcttgattattgtttgcttgtgagctaactaatcaaaccattaaagacttttcaggagttttagtgctaaacatcttaatttcaggagtgattttaagagcgtttagtgatcttgaatcaagaaatatccttgttcttgttcgactaatatcagtggttttgttcgagttcttggagttaatctcttcaagattcttattcaacttgattgttgagcttattggtttagtaatcatatcaagtggtatcagttttccagggaggagaggatagataggattctctttgatcaacaaagatccaagggctatcaacaaggttcaaacattgctgcttgttcaagacttgatctttttctaccaagatgcattctttacgtcacaaggtagtaataacaagattaagagtggtttttacatccaagaatcaatctttcacgtccaagatttcatctttcacgtctaagattcattctttaagatcaagaaagttataacaagcatagaagaacacataaccatggagtccgagatggacaagcttgccaaagctatgcaagcacttgcaaagtcgcaaactgaatcacagagtcgactcaatgagaatactaccacaatcaatgggattggtagtaacatgaataggttggaggcacgcatggatgccattgcaaccatcatacaaaagaagcttgatcggaatagtgccaacttcataggtgccaattcagaggaagagttggcagaacgtgaagaaagatcatccaagactacatacaatgatgatcgtggcttaaagttggatgactataatggagatagcaatcgagaagacttgttacagtggattcgacaacttgagaaggtatgtgattatagaggctttgatgacaagaaaagattcaggattgcctccataagactcacgaaatatgctggaatttggcttgaaagcttcaaggcacaacgagccaagaaaggtaaagaaaagttgtgtagttggacaaagttgaaagttcaagcttaaagagaagttcttgcctagtgactatgaacaaaaatagttcataagactctctactataagccaagacacgcttagtgtacatgagtacaccatggaatttgacaagctagggcttatatttgacatagaggagaaagaacaatggaagattgcaagatacatcaaaggcttgaaccgccacattgccaagaaggtggaagtatccacttatcacacctttgaggatgtgacaaagttggctaagaagtttgaagaacatgagaaggaagagaagcctaagagttcttacacgcctaagtatgatactaatgctaaggccaaggctagcttcctactcaaagtggtatgaaggacctaagaggctaagaacctcaccccacctaaagaagacacaagagttgagaagcctaaagtcgtcgttccaaaggagaaatttgaagagatgagaaagtgcttcaagtgtcaaggaaggagacacatagcaagcaattgtcctaacaaaagagtcctcaccatgagacaatacctagctttgcaagaagaggaggatgtctattagttcgtccctgatgaagagcaaacttaggggaagaagaggaggaggatgcttttgctgaggatgatgcaaggctagtaggggtcaagaggcgcaccttacatgtcgaccatacacctagcatggagcaaatggaaaaatcttttccacactagatgcaaggtaggtgactatatatgtaatggtataatagatagtggttcttgcactaatgttattgtatctgaggtagtgtcaaagctaaacttagctacaagggcacaccctaagccatacaagttgagtttgctagatgatagcactggcatgagagtaaagaaacaagctttgatttcattctctataggggttataaggatgagttatggggtgatgtattgcctatgagtgcatgtcatctcttgcttggaagaccattgcagtttgataaaaaggtcatccatgagggggactctaatgtgtactctgtgttggttggttctaagagggtatgtttgcatcccttagctcctcattcagtggcgccaaagcaaccacctaagacaccaagttactttctatcttcaagggagttcgaacaagaggtggaggaagaaggttgtgcttatgccttgattgtaagacatgctgccacaagtgtcaagactactagcaatgagaagctcgaagccttgatgaaagagtttgaggatgtctttctagaggaactacgacccttgagaggcatagaacatgctgtagaccttgtacctggcgcccctttgcctaacaagcctgcttataagtgtgatccagtggcatctagggaattgcaacgccaaattgaggacctaattgaaaagggctatttaagggagatcatgagtccatgtgttgtgccagctttactagttcctaagaaagatgacacatggaggatgtgcatagatagtagagcagtgaacaacattacagtcaagtaaaggtttcctatgcctagattggaagatatgttggataagttacatggggcatcaatcttttctaagattgatcttcgaagtggctaccaccaaatgaggatcagagaaggtgatgagtggaaaacaacattcaagaccaagcagggattgtatgagtggatggtgatgccatttgccttatgcaatgcgccaagctctttcatgagcttgatgaatgaggtacttcgtccgttccttaacaagtttgtggttgtttacatagatgatatacatatctatagccaaaatgtggaggaacacttgttgaacttgcgtagcttattcatgaagcttagagagcaccaactctatggtaagattgatggcgacgaggttgacgggggattatggcggcagtgaatcaccctctttgccggtcactgaaatacaacctgaggtatctttaaattctgtaattggattgactaacccaaaaactatgaaattgctgggaaaaattgctggatgtgaagttgtggtgatgattgaccctggggcaacccataattttttatcactagctactgttgagaaattagctattcctgtgtcggaatcggaaggatttggggtttctctaggggatggacaggcggtgaggggtagtggaatttgtagaggggtgttattgagtttaaatggtggagttgaagtggaaacagattttcagcctctgggtcttggtaattcggacgtgattttgggtgtacagtggctggagacgttggggacagtggagagcaattggaaaacacaaacaatggggtttgaaatcgagggtgtcaagttcactttgaaggtgacccatcactggcgaggtctcgaatctcactcaaagccatgatacgtaccttatgtaaagagggtggaggtttgtggcttgagttgaaccagattgagcattatcaggagaaaacaccgcattcatcagccttacctgaaattccagttttcttacagagagtccttacccaatttcagtctgtgtttgctacaccagaaggcttaccaccgataagagaacatgaacatgcaatagttcttagagaagggtgtaatccggtaggggtaataccgtaccgttatccacagttccaaaaagatgagatagagcgcctcatcaaagaaatgttggcttccggaatcatcaatccttccacgagccctttctcgagcccggtgatattagtgaagaagaaagatgggtcgtggcggttttgtgtagactatcgggccctcaataaagaaacggtccccgataagtatcccattcccgtgattgatgaattgttggatgagcttcatggggcaacacttttttcaaaactcgacttaagggccgggtatcaccagatccgggttaaggccgaagacactctcaaaacagcttttcgcactcatgaggggcattacgagtttttagtaatgccatttgggttgacaaacgcgccggcaacgtttcaatcccttatgaacgaggtcttcaaaccattcttgcgcaagtttgtcttggtatttttcgacgatatattggtctacagtagttctgccaggaacatgaggagcatttgaccttggtgttgcacaccctagcagctcataaattgtttgtgaatcagaagaaatgtgattttggcaggtcggaagtagcatatatggggcatatcatctctggtcaaggggtggctgtggatatggagaaggttcaagcgatggtggaatggccccttcctaaaaacctccgggaattacggggatttttgggccttacagggtactaccgcaaattcgtacttcactatgctcatatagccaagcctttaactgatcaactcaagagagatgcgtttgggtggtctgaggcagcaactcaagcctttgaaaagctcaagaaggcgatgatcacatcccctgttttggcaatgccggacttccaagagttgtttgtggttgagaccgacgcatccgggtatggtctgggggcagtgttaatgcaaaacaaccgacccattgccttttacagtaagttgttaggtgcccgggctcaattaaagtcgatctacgaaatggagttgatggccatctgcatggcagttcagaattggagatattatctgctgggtcgacatttcctcattcgtacagaccaacagagtttacgtcatctcactcagcagcgagaagtaagtactgccttccaacgttggatgagtaaacttatggggttcgattttgaaatacagtttaagccggggtgtgccaaccgggtagctgatgcattatcccgcaagacagtgggagaggttgaattgggtgcgctgatattaactcatggggtggactggaccgacttggagcgtgaaattgaaggcgatcctctgttgtgcaaaattaaacaagacttccacgggggtgctattactcctgtgcacttttctttggtggacaacaagctgttgttcaagggtcgatacgtgattcccagctcttcggtttttattcctaccttgctgcgagaatatcacgattctcccattggagggcattcgggggacctcaaaacatatctcaggatggctgccgactggtattggaggggcatgcgcaaggatgtggcgcggtatgtgcaacattgtagcgtgtgtcaacaacaaaaaatgtctcaacagatgccagggggggtactacaaccactccccataccttcctcggtttgggatgacttgtcaatggacttcgtggaaggcttgccatcttccaagggggtaaacaccatcctcgtggtggtcgatcgtttgtctaagtacgcccacttcctcccactacgtcatccatttactgctgtgtcggtggcaaatgtgtttgtcaaagaggtggttcgtttgcatgggtttccttcctccattgtttcagatcgggatcgaatttttatgagtgtgttttggcgggaattatttcgtttacatgacaccacactcaaacgaagtaccgcgtatcatcctcaaacggatggtcagtccgaaatcgtcaatcgagctctggagacttatttgcgttgctttgtgggggaatacccgcgctcttgggctcagtggcttgggccgaattttcatataatacttctcctcatctctctaccaaaatgaccccgtcaaggtcctttatggtagagaccctcctactgtgatacgggttaatcggggagcctcacctgttgaaagcttggaaaacatgctccaagagcgagacgcagtattagatgccttgcagattaatctgattaaagctcaacagaaaatgaagagtagtgctgatgctacaagaagagaggtgcattttaaggtgggagatcgagtgtacttaaaattacagccttaccgtcagaaatctttggcttaacgcccttatgagaagttagccgcccgtttctacggaccatttactattttacagaagattgggcaagctgcatacaagttacaacttcctgtttctagcaaggtgcatccggtgtttcatgtctcccaactgaaacaggccgttggttccattcccgtttcagccactattccagagcaattgtcttctgacttggagttagaggtggaacctgatgaactcctcgatgttcgtagtgtttctagaggccagcacacttacttggaagctctcattcagtggcagggattaccatcattcgaagctacctgggaagatgtggctgctttccatcaccattttccatccttccaccttgaggacaaggtgaaactttgggggggtggtaatgtgatgcaccaaactaccactccactactcacctattagaggcgtaagaaaaagggggtaaatcaggaatagtttacaaattctgttgaaaggaatattttgtaattatgatgtcagaggttgttagcaaaaaggcagtagagtaacaataaaaaggggaagggaggagagaagaaggtattgagatttttgtaaggaacttggcccttgggagagttgggagcctctcgaaagctcaccattatcttgtgaatattttccttcctggttatatacaagaaccttcctctgtcaatttcttttctctctaatcttatttcttattctgttttctggttgccattgtttgaagttgcttgttgtgcttgagtaaatacgtgaagtggtgaaacccatctgaattcatcacatctattccaagtggtataatacaagcttgtaatccaaatctaatgagaaatctaagttatgaagaatttcaaaagaactaagtacccttgttttggatgcccaaggatttacttgccgctcaagttaatgctcaacgtgcaagatacaacctctttagtatcccaaggtagtttccataagaattaattgagctcaaatcaagaacaatatttttatgtattaatgtgaacacttcctgaattatattagatatatggtctgaaggttggaagaaagattagcttttaattttaagtttgagatagtttttagaatcgaggaaagattagctcttaacttgtaaactaaggattgctttataagtaaaacattagttatggaactcttaaaattggttttgaacatttctagttaaaaatcccatgtaattctcccaaactagcttaaaatctcacatttcacaagctaaggagagacaaatggcgttctcttgtgaaacaatctaaaattttcattaggctactgttttcaagtatttatatgttagaagtgccgcatataggtacataaaataagtttacaaacacaagtaggaataaggaaaactaaaagagaaacttcagccatacaaaaccggctgaaatcagctactactttctactttctagcttcaaaatctgattgcaagtctcctttaagccaatcaccaatgaaaacctttcctccacatgaagtgtgctcaaatcaagagaagaaacccatcattcgcctatagctacctgggtcagatgaagatacggcaaaaaaaacgctggaaatcagtgaaccaaaataagcaccaattggatgctttctgtccttgctacattttcttctcataggactacttcaagccatacatgaataagcagttagatccagctcctagcatccatttgatcgtacaaatgagctccaaaaagataagtaaaaccaagcagccaaaacctaattaatactaatgatgaattagttgaatagctaatgacgatgaagcaacactttagtaggaatagtgttaattatgatcaatgctacttaatcttctgattaatttttggaaaaatgtcatatctaccttctgtatacacttattcataactatatcgtattattattatttttaaataactaccttttaagtaccaaaacctaagaaatcaggcacttgatggattccatccaaagatccatttggcggggcccactaactgacttttgattttttgcctttcctcttttggttaatctcaatggttcatcaataacaactcaatcttctccccatttcatcaaatcatccctaaatcagaactttttcaaattcacccaaatgaggttatggaaacctctaccaagtttattcgaccacttttagtctagctcaaagttttacacttgcttcaaaaactaagatttattaactttagaaattaggtttttatttttattttttatttaactttgtaacaatcttaaataactcaggtgctttctagagtttggctttaattgtttttcccttggttatgtgaaagaagtatgactactttctccaagactaaagtagagagcaaaaaatgcaattctggaatttcttgcaaaagaaaaggaacgagttaatgataatgaaaaacaaagaaaatgatgagaagagaggagctgaatcaatcatgatcatgtattttaaagttttttttgctattgaagtgacttaagaagaggaaagaggatgagtgaagacaaacaaaagaaaggataaatagagggaaatcttgggcttagaaaggtgaaaaggtaagaagatgagttagtgggccccaacaaatgtatctttggatataatccgtcatgccactgtttggggcttgcttaagtccatacattacttcactaattttacaaaatttattttcttgaccaagaactgaaaaaaccttcagtggtgatctattaggttttggaagttaaaaggtagttatttaaatgtttttaatataaaaggtagttatttagatatttttaatataaaaggtagttatgtgaataaaagtgtatataaaatgtaattttttgacatttttgccttagtttttcttgctaattcaccttttcaacttgaccaagttgctatgaggagaaaacgagcaattattaagcaaatcgcaacactagcattaatccatggcccatgaaactctccataattagagattggattagcacttagtagaacttcttgctcctgctccaggtttccattacttctttatctaagtgcatcaaaaggttgttgggttatgaaaggtggtggttgtgtatagtcattgtcaaaatgttgttaatgcactctatttagaggatgagggattgaatagttttcacctcgtgacctttcattcctttttaaaaaaattgataatgtgtattggtcctatgactgtatgaatggtaataagctatctcatgagctgttactatcttcctcagagtctaggtagaagggtttgggctgataattttctactatgtgcaattagtttgttggatttggatatgctagttgatataggtcctttcccttgggccttctcttaatataggcctacagtgtgattgaagataaatcttctggagaatataagaacaatgagatggattggttagaggttgatttgttcttttggtgtaagactatttcgggttctctattggttatgttcagacgccagaatatgtgttggtgattgttttccatgaacatactttatccgcagagacatttttcttttttcttcctataagattatatttgtttcctctcttggtgctcatctcagtgtctctactttacgttaaactgttgacattacttgacaatgcgtatatttgtcgcatggtgctcttccctcactccacgtcgaccccatacatcaaaaaatgccattaaagaatattcgaactcacaaccttgtgttgaaagaatggaatccctaccaatgactcattaattcattttctctttaagaaataaatgatttcctcacaaacttttaggctttaagagcccaaaagataaaaacataaaataagatagacatcaacgtcaagattagccttaaatgcacaaagcacatgtcaaatgattgataactactcacgagttgcaactctttgggcgttgcctaatattaattggatctcttttaaaaattgttggtggttatggttggtggagaggaccatgtaacttttagctggtcacaactggtaatgattgtcacttttactgcccataaaaaaatttaaactgttgaatatgtttctggcagtggatctgacaaatcctttacaagttggcgtccattttgttttgccatgtgactcaattataatacgtgagttttattatccaccaggtttggctcactaatttccggattaattcaatctaaactgtctccaaagaaggaaaagggtggaggaggaaagccttcttctaatgaaaagacacgcatacgtggttcgttttctttccagggtggaatgcaggtattagcatgtagctttcattctgttaacatttgtggttcttccagacatacatccaatgctttttttttttcttgctataaccataaacattcttgtcatgaacattctttaatactgttgctgagcttagtgtattcgttcattcatgtaatttcctctcttgaggttaaaatggcatacagccttacaacctatatccataatgctccttagagtagaatccctaggttataacatagtaccacttatcaaaataaacatggcacacactgcaggacaagaagtaaatccacctagagaactgagcacctagtagtaaaagcagcgatacattactaataacagtagcagggccataagagtagtaaatgggcctcatttcaacactccccccgtaatggtgagagagaagaagcagtctgaactcccagcttggagagcaaaatagagtgttgctgaacagggagaaccttagtgaaaacatctggcacttgatcttgagatggaacataggtaggctgaataaccccttcttcatttgtattgtccctcaggaaatgacaatctatgtctacatgcttggttttctcatgatgaactagatatgctgctatggcaagagcagcttggttatcacagtagataggagtagcactggactttttaatgcgaagatctttgaggagttgtttgatccacatcacctcacacacagcaagagccatggatctgtactctgcactgaccacaagaaattgcctctttgactttcaagatacggggggagtcaccaaggagcacacaaaaccagatgtagaatttacaacacccatcccattcactatcacaaaatgctgttagttgagcactagacttgttcgccatgagaattcaccctgttggcagcttgaagatgcacattagtggggcagtgcataaatttgcttaaatcatgtatagtgaaggcaatatcaggcattgccttgtaatagtgagataaatgagcttccccatcaatttttgatacacatcaggttgttgaagaggatcaccattgtcagcatagagcttgacatgtgagtccatacgaagcctcaatcgtctgcaatttataaaaccatattcatcaacaagacccatcacatacttctttagagataaaaacgatacttcactacactgatccacttcaatcctcaaaaaatatcttaggccacccatatctttcatgtgaaattggccagcgaagaaactctttgcttcctcaatagttgctaaactattgccagcaagaatgaggtcgtccacatacaccaatatagcactgaaacagtgagagttttgcttgaagaatagagagtagtcacacttggattaagtgaatacattttgctttaaagcagtgttagcttggcaaaccattgcctcaaagcctacttcaagccataaagtgacttaagcagcttgcacaccttagttcatttggtgtcacttctgccatcagtacttagctccccctctccttgaactttgatcctgttacatgtttcactatatcctggtgatagcttcatgtatacactatcctacaattcaccatgcaaaaaagcatttttaacatccatttgtttgcaagaaccaaccctctaaggatgcaacaacaagcatgtggtcatctttgctacaggggtaaaagtctgctcataatctattccatatctctgtctgtcacccatgattacaagccttggcttatgcctattatttgtgccatcagtgctgtattttgttctgatccatccatgtgagggatggctcatttctacaaaatcctagttccgttaggatttgtgttgttttcctaattctagtaggaataggactcctaaaatcctaatcctcctagttctgttaggagtttaaaagttttagtttgattgtaattctagttgtgttagaaatccaaatcctagattcatgtcacgtatggttagaacatggctagtaggataatttgtcttgtgatgtccatagccttggcatttgtggcacctaactttcaatagcttgtcttctgtctccttttctttctccttctttgaggaatcaacgtttttagagctatctaaaccactagcatcaatattaggtttaaaagtgctaaaagatttcgaatagttcttacttgcatacaatttctttttctagtttatgtagcgtcaccagggaacaaaaactcggccgttccgttctggaacggccgctttgtaacggatttcagagaggccgttccgttaaataccgttctagaacggtgatttggaattcacaccaaactcggcgcgatagcgttacgtaacggtgtaacggcgttccagaaccgttacaatcacataacgtccgttatttgaagaagaccagttcttttggtggaggaagaagaagagccaacgcaagatctatagatctgagttaaaatttgaaaataaaacatgtttttttatttaaattaaagcttacagaggatgtagaactcaaattcgagtaaacccctcctttaatttcattaggttactgcaaatcgaaccctaaattgcaaaccctaatttcgaaaaaaccctaatatgcattgggatgcaacgctgcttctccggtcatggcagagaaggtcgacgagtcatcttcggctgcttttagcactgtagctgccggtggttggcttgtttgcaggttagtgcttgctggttttctttctctcataccgatcatcttcttcttttctctcttctctttttcttttttattgtgtgactgccagtcacgtgataattgcaactcataaagtatctctttctctctcttcttttcatccctttttatttttctttcccttttagtttttattccctcacgtggaatcacctaattttcatccttttttatttttttagttacactcttacacagaagtatgttcaaatatcattatagtacctcaaatattgtatttataagagttttggacataatatgatatagaaagtaaaatagaagaaaaataaagtttaaatgtcacttgtgtgatttttttaaaaaaattcacgccgcgacggccgcgaaacgttctatttcccgttacaagccgttcccgcgataacgcgaccgttcccgcgaacgcgaccgcgaccgcgttttttttccttgagcgtcacatcttgcaagcttcttcaaaggtgagttatgtgtacaactccaatttctctccaatcccctccgtcctcatttaggcctccaaggaagctacttaaacattgatcttcaagttcatcaattttccaaagaatggataacttctcgaactcctttatgtaatcttcaacggacatattcccttgtttaagagtagaccattccatgtacaagctttgtttgtagttagaaggaacaaaacgtcctcttaacaactttttaagcttatcccaagtagagattttgggtttattagctttcacacgctgcctctttactccatccaaccaaatagatgcatatttggttaccttaagcacggccaccttgtatttcttttcttttggtgtctcttaatcccaagtagagcttttgcgtgtgaaagctaataaacacaaaatctctacttgggataatcttcttcttgtttccgaaacaactaattcttatggtagttaggaaagcaagaatggtttctaattcaatagggaatatattaattattattagtttaagttaaatagtgcacgaatctaaatagattattcgtctcaaaatctcacttaagtatagatttgtttggacatctgagggaagaagaagagagcgagataaaggagaattatcactcaatgaatccatatcccgagttttcccatttacttctttgaaagcaatatagttcacgaggtcttattatcagtctatggacataagagtaataatttaagggcaaaaactatgactttatgggtttaaactgatacatgttctgttaaactgatagatgttctgtgttaaaccgatactcatatattcctggttaaactgatagatatatgatttaaattgatacccgtctcagtcatgtcttggattgagacggtctgacacaagactttttgtgtattatatatctgattagaataaatttatcctgtttactaattattttatcttctccagacacttgttgacacaatatgcaatcagtttggtaaagatgaactcaaactacagtgcaaggtcctttcattgtcctacagtcataaggggatcccttcttcagaaaattgggtcgtgtcttctgtgtcaaaaaattccattgaagatcaacaatatgatgctgtcatcgttaccgtgagttttactttgcttactgctattgcaccaatctttcttcttttgacacactgataatggcaatgctgttgtggtttgaagccatgttatggggttttagggatatttatggagtctgatctaatatgttattggataaaattcagatctgtaacgtgactcaatgagattgaaaaaaattgaatcaagataatggattggaaaattaggagctaacctagggtctataagcgatccacttggagtctcataccaagcaggtattcgacattttaggtttatattgctgctatggctcatatgggagcctacatagggtctggtgcttattcctttttcttttgtctagttttggggctgcacatttctgttgtgttttgatatggatagccatcacctgcaattgcatggaggctgaactaagttctataggggagcaaacagtatctgttggaaatttattttcatattgtgtttttaaatgctataatccaaaatttgttgttcccctaaaatgcctaaaatacccttatgtaactgctccatctgtcccttaatagacttcccatttctccaatgcatgtttgccaatacacattttgtattgttaatatcaaaaattacatattagtaaaaattataaaagtttgattttcctaatgtacgcaatgagacgaatcaaacaagacgccatatgactatgttttttcttatacttcctatgttttttaataagtgacatgttttccttttagggaaatgtcacaataagtgacacatagctcaaagtagtaaaaatacttctcatttattacatctttgccattatttaattgtttcacctacctactttatccaatactcaaatttgattggttgaacaattggtcccaactttctctagactccttggtattccctttcccccactttctctctgtgtcacttattaaaaaatggaggacgtatattggaaaaaaattggaaggttttcttcacttatgaatagtggtaaaattagagatgggaaggctattttgggatggatggagtaatatttaaatttttaaaataatgtcattgttttagtgatgaaataaaattcaaggctattttttctagtaattatgttatctgtacatcaccacacgtatcgcgtgcatataagactagtttgatgatattccaacactgttcgaaggaagtcaggcatggaaccatgtttgcttccatatgggaaatattttgcttactctccttcaaacatctacctcattatcccagaatgattgatcgaatctaatacaaatatacaattgatcatatgccaccagggaattacatcaaattaaatttttatagaaggggaatcagtcatagcctcatagggaacgaataagtgatactcgccagtttctttcctggttacttttcctcttctcactagccatcctttatgtatgggtatgctgcatcattcctgccactggttgggactcccgtttgaactatggggggatgggaaagctaagccatcatcttcaaattgagtttcttgagaatgtaagacaccatctgtaagatgaatatagtgcactctatagtcaatgtcatgatctttatgggtttatctgctgaaataactgtgatatacccagctctccatttacaaagttttcctacatattaaactcttgcccgcaattctagaacttcattgtagaacttttcctacataagcatcatttgtcttttctgtagtaaaagttagaaagagctttattttagaacattcgtttttagttttctttgttgttgattactccgccacttttaatacttttatgattcaagtatttgacaaaatcatgtaatttaggtcctctgctgcatgcagtctataccctctctctctctctctctctctctctctctgtggttgtgtcttacttgttgagttactaactccagccattacataaagtaggctggcattatgatgagcaaattactcaagaccacatgttagctcctttttcttttctccttattctgaaaggcaaatataggtccatcttggtgcttctcatgtcataagtaagctgaccccctccttttccagggaataggacaataatccaaaagtgagggttttacatgttgggatttgtgaagtttcttattttacttaatagccgagtcagtgttacaatacatagtaccgtgttacaaaatagtatgtaacaccaagcatgtttatgtgcaaaattgtgcaagactttgttgctggcacgccaagggctgttttaatgtagtttacttattcttttaggtttttcagatgacaatcataaagggaattaggagtgtttttattgtagtcaatccctattgtgctacaacgataaaagaaaaaagcacaagactagaaggagaagtaatgtctaggaaagactcctcacctggggttgctagtcacctacacatcttagaaggcatcaaaccaaagcttattcccctcgactgttttcgggagaaaagaagacaaaattgtttctaacttatactttaccagtttcactacagcatcagaaagaagcaaaatatgctcccacaacacggcgaacctagctttccagatgtgataaaccagaccagcaaaatgattattttcactagagctttgagtctattttttcggtttttccccttcttcctggtaatgtcacgccaccaagccatcatctcaattttttgagatttgacgtaatcgctcaaatagctgagtaagacacttcttgctctaaatactaataaaaaagaggtgaatgtgggtctcagccatgttactcaaatcggataaagtgtctactcttattagggtttttgggtgttggactcatccatttttttttgtaaaatgtcaagattttggtttgaaatgagagattcaagtgtcgtgacatgagtcggcacgcaacacttaaacgtgtcgaagtaacagagggtctcagacaatcaactttaatcaatcacgaaccccaaaatttatgcaacctttgctcatattcagtctctgtaaagcactcaactgcagcacacccacccattcgcttcacctacagcaggagggcacccaagtaattgctatgatgagcgaattattctgttttgccttgctggaatattgctgttagatttgctgactcactggcagttaattatagtcagagaatgagaaatatcctgtagagagagaaagggtatcttttgtatttagctctataaatagctaaggaagggaagggcattgagagtttatgatattataataggagagatttagcctctcgaatgctgataggagcgtagctcttgttggattatcaatactactctgtttgctctatctatttctactcaggttccttcttgtacagtggatccctgattggatttacttcatcaaccagcagataaaattatttgtaggcacattgaaaccattccaaacctaatgaggccaaagtttatcacaaagaatataggagccaaatgtaggcaacagataagagtataattgccagaagttgaagactccaggtattgttcagaaaccttaatgcatatcatcattctgacactagattttccccggagccaactaacaaaaatgaattaaagagattaaggctatgtttagttcacctgaaattttctgatctgaacttatctgatctgatctgaacttattttttctgatctgatctgatctgatctgaaccaatctgattacaagatcttatcttttagatttttctcaatatataagaaaaaatatagtcatgtggggtcttgtttgattcgtctcaatgagtactttattaatattcaattattataatttttactaatatgtaatgaaagatataatgatttttaaatataagcatgatctgaactgatctgatgtgaacttattttttctgatctgatctgatctgattagatctgaaataagcaaaaataaggtgaactgaacatagcctaagcaacaattgagggaaaataagatcattatggctaagataagataaatatgtaatgataaaatcagagtaattatatcagttacactctcaacattcgtcagattgaggtttcctcccaaaatgccaacccacttttctgtattttcacgtccttctctctacccttctaggtatatattacatcagctgtaaaatttttgaaccaactagtagaatactgatctaccctcaactgcctcactttctcattttttctgggcctttttctctctagcacaagtccacataagtgatgcatagcagaaatataattccactagtcatcctcaatattgatataacaaacacatcacccacatattatcatttttaatcgctgcatgcgaggcatacttacccaccaatcaggatatgcataacagcgttcctaattccaaaaccaccatatatcttgggtttgcaactctcatccctagcaacaaggggactttctgaaaaagtggcagattccgcccacaagtagtttgtacggacacctttattatattattaatatcatatttcggcaacacaaattaccagcccagtaaaacatgaattgacatgagactaacaaggggcccaatctaatatcgtacgtctgtactaagcaatgtataaaaaaaagctcaaggtgcattgatgcaatagggatcctaatgtgcataggtgcgcctcattgaagtgaggcaccactaaggataaataaaaaagattgatgtaaaattaaattgtgcaccttgggtgcgcctcgatgaactttttttgtgtgcctaagtgtacctcaagtacgcctcattgatatcgcctcgcctggcagaaaacgagcttgaccccaatcgccttgctccccaccgcctaggcgtgcctcagtcacactttttaaatacattggtattaagtactcagaatggcaaaaagaaactttgggcattaattagacatttcactttttgtgcaactatttgtgacttcagagattgatatgttttctacattacagacttttgtgatggctgcatggtctccactgtcaaagaacattagtttaagtagaagaaatattgctctattaccttcctccctctacaaacaaaatcctaaaatgtggttatgtagtgccaattcaaacttgtagatgcatgactaatgctttcattatgctgtgggtttttatactatgattcatgtccaattacataacaattagctggagtcaggatatgtcacggaaattttaagcctggcaggatgattgtttatattttctctttttcggtgtttaagtcaaagtaaacttctaggctgctcttttataggctagttgggctgttggggagatctacacattaagtgtgaagaaatcttgtctaactccagtttggttgagaactgtaagctgtcataacatttgttgcatgatgaggccttgtgggattatcatgttagctgtaaactctaaacttacttgaaatctagtgttgtgtctccttatttctgtagtcaaaattgaaccttctgtacgtttttgatacctgcgactagaatgatggaattctgaattactgatactattacaaccatctgctaagaacgaagatgactcttagctaatttctcagcagatttagagaaattaagaagaattactaatgaatatttaaagagaaaactaccaagatatgattgtattgatgaaaaacaccaattacaacctaaccaacattcgagaggttggagctctcccaagtaaccatttctctcactaaacttatcaattttcaagatgccttttccattctcagttcctctatatttatactactccccttagcaaactacccaacttattccccaagtaaactaaagagataatatctaaaatacccttccccctacaataatattagttcttagcattaccggccccctaaacttccaccttgtcctcaaggtgggtcgtaatcatcactaaattctgggcctctactcgtatattcagtgtcttgcagcccttcaggccccaagcctaggttatgcagctcgtgttgcggctcctcctcatatagttctctggctggagtgagtgcctcaactataatgaaaaagtcctggaggtggggaaggaaggagtgtctgaaatggtgtggtgtgctgctggtgttatgggcttgtgcctgaaagttttgggtttaaagagatggagtggagaagagtggagaagtgactggagacgtaaaagaaggaatcataatttttgtaagtggtgggttgaaaaagttggtgggaagaattgtttttataaaatgtagtgtaatggtcgaaaaatgggtggagtaagtatggtttttggctggggatgtggtactgggttgaaaataaataggtctgagcttacttgtaaaattggcctcaacatgagcaggcccaatatcttgagccaattccccaaaagctggcaatagagcactcttaattgcattgttgtgggccatcgggctccaaacatatattcggaggagccggacttctttggtgatgtcattagcttggcccattgcacactttcccttaacagcctcaagatcttttcccacttttgtaccccaaccacgtggcttcaccatcctttctttcttgcttttgtcacttttttggcaatatacgagtttgtccttactaccctcatcttctaatgttggcttcctcaccaagcttaatttctggaattttgtccaccaaatcccaccacccatcgtcaacaccatacctatctacaccggccaagaagcctggtcctccacccgaattttcgccacagacaaagcctgaacaaccgtcagttctctcaccggagaagttcacaggtccaccacctgacccactagttgctgatccacccttcacaaatctccctcctctggctgccacaagtagtggttcctccgtaatactcatatttctcgtccaagagccctggaccaccaccggacccacttccaccggcaccaacttgttcaaatgatacttctctttcttttccaaacagcctacttggactggaaaaaccactgcgattgtagcctccgccagatctgtagcctagtgcacctaacgtgcttccaactgcaacccaatagggatggaaatggatgggattcggggagggtggagcatcacccgcatccgtcacccgcatccattcgctccacccgctccacccgcatccatccatccgtcacccacgggtgaaacgggtgggtcggtgataaacgggtggaaccatttagggggtgtttggtatcatgtttttttacaaaagaaacagaatcaagtaacaaaatccgtttctacttgtttggttctatgttgctcagactcgagtacccatgtccgacacgggtacgtgtccaagtgtccaactcagctattttctagaattttttatattttttaacccaaaacaaagtgtccaagtgtcccacccatgtccgactcccgaggatccgacacgggtacttgaggtgaaatgaagagtccgagcaacggaggtttggttagtgtgtaaagtaacaattaccgttacttgaggaaaacacatccccccaagttgtttccattcaaaaacctaaggaaacaaataacgtttcactcctcaaacaagaggaaagggaatgggttatatttatttccattccattaggataccaaacaactaataagggtaacacttattattatcctttcccctccttatcaaaatcctttccattccgtttacggtattcataccaaacacccccttagtatattttctaatgaaatttgtgatatgatatgcatgatataaaataattctatcaaaaatataaaaagtaagtaaacttacatgtacaacttaatagatgggtgatgggttggaggttaaacgagtgatggatcgggtgacgggtgaagaaattctcacccaccactcgctttccatccatttaaattaggtttttcatccatttaaaaaaccgggttaaacaggtgatgtatgatccatcacccatttccatcctcaaacacatcccgatttgtttactgcaccaccagatccaccagtataaccacccgaaaaatcatcatgccttctactagccttgtaacctgctcccggtgagaagcttcttccacaagtggtggtcgctggacctccatctccttcttccccaaaaaattttccatgacacccactcgacccttcatctgtgacaacctcttcttcgtccacctctgaagttttggggtcgtcttcctcctcaagctcctcttgaagtaactttaacttccgttggatgggagagaacgcttcattgattatcttcaccagatcttcttgaagtttctcgaaactttttctcacgttttcctctacctctttcgtgatttcctttccgatctccttcatttttagactaggagctcttgcgattccatggcagatttctttttttaaaacaagaaaatcaggcacttaatctcccagaatagtggtgctctgataccattttctaagaaccaagatgactcttagctaatttctcagcataacaacaaatttagagaaattaagaagaattactaatgaatatttaaagagaaaactactaagatatgattgtattgatgaaaaacaccgattacaacctaaccaagaggttggagctctcccaagtaaccatttctctcactaaacttatcaattttcaagatgccgtttactactccccttagcaaactacccaacttattccccaataaactaaagagataatatctaaaatacccttccccctacaatattagttcttagcaccatcaaactgggatggatggttttgtaaggttccaatttacttctccatcaaaatattttaggattttttatctcatgtattttagagtttcctcgtccctttttatctgataagattcttctgatgatttgattttatggtaggctccaatcagcaatattaaagaactgaagattctgaaagctggagttccattttcacttgacttcattccagaggtttgtatttttatagtggttagacatgcttcccctagttttcaaagtaaaagcatccttgttgtgacgatattttttcccttgtttttgtttttattattatcatcacttatttccattttctattttccatgctgataagatgttcatcaccataatcttgtggtatcagaagtgtttagtggagtttattcactacacatgcagttgttcttttgccatgaccgccattcattttctcgtcaaaacaaatctatgaagtttggttttcagactcatggttcttgtagctcttgtgaatttttttttcttctccttgcatgcattcttcaaattacatattgcatataccaggtgctctcctttattttatatttaatttttaaaattctatcatatattttttaatgtcaaacctcaaactaggggttcactgcatcttaggcttaccaggctaatatttctttacttaaccttttccctttatatttgctatcctcttgtgtagtaatcaccataagaagggtacaaactaaattaccctcccattcttttgtatcattctgaaatagtgtcacagagctttgatttttttgccctcatttaatctggcaaatgttctctctatttttttttttttactttcttttgacgggattctcaggcaattgttacggggagcagccagtcacactgtttctgtttattatgcaggtgagttacctgcccctctctgttatgattactgcgtttaagaagaccagcgttacaagacctcttgagggcttcggagttcttatcccttcgaatgagcaacataatggactgaagactctcggtaattgtctggttcacgtgtgtagcgaatcagattttcaaacgctgattccgcaatattgcagctactctgttttcatctatgatgtttccagatcgtgctttctccgatatgtatctctatactacctttgttggaggaagcagaaatagagaacttgcaaaagcttcaacgtatgagatatgcaatgttttaaatgtatgctatagtcatcgtttcaaccttttggtgcctttttcttactaatttatcctcctggtttaatgatcttagggatgaattggagcaaatagtttcgtctgatctccaccagctgttgggcactgagggaaaacctacttttgtgaagtattgatatctttcacccaacttaacatgatttgtgcttataatatgttaaataaagtaactgaaatcctgaaattaagactacgaaactgtatggtgacagtcatttttactggaacaatgcattccctttatatgggcacaattacgactcagttctgagagcaatagaaaagatggaaagagatcttcctggacttttttacgcaggtaatctgtcatttgcttgttgcgataaagttcatgtacagttggcatatcaatcaacttgcattctttcttgctaactccaaacaatcaggatcattaacttgtaggctgcagcaacagagagtatctcccaagttgttaggtttcatgtaacctcgtcgctgagatgaaatttccgttggctaaaaagtgaaagttttgtattgatgttacccaaaacaaaagtattttgcatgttgcttgaagttttggttgtttcagatagtacatcctttgacatgaaaataaatggaaaagcgtatgtcaagcaattatcatctagtttctttgtttctagatactagccgcatttgatcccagatcatttttgaggaagtcagctgaaataccgtagctatccttcagttttcataataaaactttaatggatctgatgtacagtaatttagtgtgcaccgggttaataattgatattaacttcatatagtgagtcttataaagatataatgaacttatatacaatatagtggattttattaatggaaaacatatagtgaaactatatgcaatatagtatgatacataaagacttagacaacaagagcattcgaaattacaaagaacaaaggaaagaacaattgtatcaaaccggttcgaatgaacaaacaaccaccacttccacaatcaatgtaccaccaatcaagactaaactataacaatgagcttctagtttaagtctactttgagttttaatcaccaattcaacgattagatgatcaaaattgcaaaggttaagagttggtcaaacctaaccaagagttacactaggcacatagctttgttaggagtatattagtttatgaattctagttaagttagaaatccaatacctagttggattaggattcctaattggattagaattatagtttagttagaattctagtaatagtaggcgtgtgattaggagatataattagcttaattcttatattgttagtttaattcttatcctcgttttaggtttatctttagtcgaacttgtaccctatataaggggcctttatttcattaataatatagtttattttgagtttaaacctttacttgtgattgtttgcttgagaggttattaatcgaaccattaataacttttcaggattgttaagtttttagtgttaaacatcttaatttcaggagtgattttaagagtgtttagattcttgtattcaagtttcaggactgatcttgaatcaagaaatatccctagtttcgactaatatcataagtagttcgaattcttggagtcttttcttcaagattcatattcataacttgattatttagacttcttggttttgtaatcatatcaagtggtatcagttttccagggaggagaggatacaaagggttctctttgatcaaagaagatccaagggcatcaataagaatgacacttgcaataagttcgagtgatacaaacaacttcaagactcgatcttttgctaccaagaaccaatcttgacgcctgaagattgttaggacaaaggataagaagtgtttctacatccaagattgcattctttacgtccaagattgcgtcaagatccattctttaagttcaagaaaggagtagaaagcattcgaacactacttaaacatgacatccgagatggataagctggctatggccatgagtgccttggcacaatcacaaactgagtcacgcaaccacatgggtaggatggaggcacgtgaccgtggattgaaactagatgactatagtggagatggcaatccagaagacttgttggagtggatttgccaactaggcaaagtgagtgattataggggctttgatcacaagaagagattcaaggttgcttccattaggctcacgaagtatgctggaatacggctcgaaggattgcatgcacaaacttcttgcctaatgactatgaacaaaaacagttcataaggctcgcatcaataagccaaaacacacttagtgtacacgaatacagcatggagtttgacaaattagggcttatatgtgacatagaagagaaagagcaatacaagattgcaatgtacattaaagggttgaatcgatatatagccaagaagatcgaagtctcaacttatcacttctttgaggatgtgactaaattggctaagaaattcgaagagcatgacaaagaagaagggcctaagagttcttacacacctaagtatgactctagtgctaaagggaaatcaacagttccctactcaaggtggtcggaaagacctaagaaccccactacacctaaggaggacactagcatggagaagacaaaagtggccgtacctaaggagagtttaattttgtgttttatacatctttgcttaagagcttaacaattgaaactattaataacttttcaggatggttaagtttttagtgttaaacatcttaatttcaggagtgattttaagagtatttagattcttgtattcaagtttcaggagtgatcttgaatcaagaaatatccccttgttcaactattataattgatcttattcgagttcttggagttaatttcttcaagattcatattcatacttgattattagacttcttggtttagtaatcatatcaatatcattagcattaatttacccccagggagattaagaaaggattagcctaatcaaggcgcttaagaagtttttaggaaaaatcgtgcttgttaagcttaagaattgaacttctttcaccatttgcccttgattctcttgttgaactagaagatcttggttcatagtagatgctcctgcatcatagtagagcatttaattttaattttttaacatgcacgaagatgtaggtagtgtagtatatatcgtgagacgtggtttaacatatagaaagatgtagtttctgcatgatatagtgagtttttgcatgatatagtgaatgtctgaatgatacagtggatcgttccgaattgttgtagtttgtatgatatagtatttttgtgaatgatatagtgagtttcttcatgatacaatgggtttctgaatgatatagtggattgcttagaaatgatatagtgagcttttgtatcatgtagtaggtttctatgtgatataggttgttaaaagatgatacatgcttttggcctcatgtactctaatgttaacgtgaacccggtccttgcaagtcaattgcagttttttcaatattaagctatttttttttttttttttttttttttttttttttttttgtacgggaatatttagcatctttaccacaaacataaccatacgaatattatgcggaaattccagtctgaagtcttaacttttcaaaattaaaagcttctatattatttttggaatgaaaaaaaatgagctatggcatgttattttgaaatacaatgagtctcaaggtgcatagtggcttcaattctacgaataatgaatggactactgatttctaattttttgttccgggcttttgcattaggtaaccataaagatggactctctgtgggaagaactatttcctctggatacaaagctgcggagcttgtgatatcctatctcaactctacttaagatgcctaaatgatcgaggagactccgtaagtcctttctctgattctatctttgaactgagtggaaacacgactgtggtctaaagtagttgatgtctcagatatccagaaatggcgttagtgatattcaggagctgtccattgaccctttgattcattgttgcagtttactgaaagttgttagctggtctcagaaaaacgaaaggaaaaaagggggaaaacaaaaacaaagaaacgtagattgtggtgttaaaatcaagaattccagagatttgtaccttctttatcagttgaattgtttacagtgtgaatcaagaagttagctcgaccttcttttcttgtgaatggtaagatttcgtgatcatcaatacttgattgtgctgtttgcaacttcaacggtaagatttcctgatcttacagtttaattgcttgtgctgtttgccactt

SEQ ID NO: 100 - DNA, 37009 bp, synthetic construct
  source 1..37009: mol_type = other DNA
tattccatcgaatgtagcaaattgactgtccgttgcaatttcggagtttccactcgtcgcatggtaaatggtaatgctatacgattctcacctctcaggagtctcaactcatcttcaactatcgcaggcatttcccaggaagaacccattaatggccaaagtgtctgagccgggtaaacccagtaagtcaaacattcgaatcacaactcaagcaaatttgtcttgtttgcgttatattttgctcatttcagccttttttgtttttccgacctttgcatactgaatattgtgtgtgtgtgtgtgtggggtttcagcttctgctaaaaggattgctgttgttggtgctggtgttaggtaaattttcgtctcttgcagagtttttgagtcatttgggaattctatgtgaaacttgtaactcccttcagtccaacgaacgcagtacaattttctatcaaatcatggtcctaatttccaattttccatatatattgttggaattatattgggattgtctatcactattaatagtattaggatcaattgtagagaagcacagaaatttttgggatcgaaagaatatctggattgccacattaacagcagatataattcttccaattggtttttggttcttcctaccttgacttgtctggtcaaacattataaactttaacctttaatatccattaaagtaaactataggatttttttgtctaaaacatgcttatataacatgaaatttgtgagaaaccaccttatatatatttttttgcgaaaacaaaccttaaacaaaattattatcgtgagaacaaaccttatgccaatttcgatcattgacccaaggttttggcattgaccgtgtcatgaattttgttgggtttaaaaagtcatgtgtcttgcatacgaaatggtaaatgcgggaaccttgggtcaatgtttggaatccgcataaggtttgttctcccaaaaaatgtttttgttcaaggtttgtttttgcaaaaaaacttatataaggtgctttctcagaaatttcatgttttataaagtagtatttgacaaaaaaccctaaaatatattatagaattattattgactaaattgtgtaaaaatgtactcttctaaaagtacattatagtattttagtggaacatttgcgagaaactactttataaatacgatttttgcgagaaatttcctaataaaaaaatgtgaagtgcaaaactatcttattgataattttctactccctcaaatccaaaatactatgaagtctttcctttctggtttgtcccagattagtttgtacgcttccatctttggtatgatcccacttttattatacttattagttttacgtgagttccttactctatctcttttaacaaaaatactcaactatctctatccaataaaaagttccttactagtcctatcacatctgctttttaataaaataacgtttgataaccacacaacttatatccttaaaatacacgttcaaccaagtgttgagattaatttggacggagggaataaatattttttgaggcatattggtagcagtattcggattccgataggttgactatgtttccaatgttgaccaacacttgccttgcatgtaattctaactttgctcttttttattcttcatttccctcgtattccatatacaatgtttagagacccattccttcctcttctcttctttcccttccttactatgctttgccataatcttcctcaaatgagtgcaaattaatttgtcgttgatgtaggccaactgattgtagcacatcttcatagttcatacctcaacacactcgtaattatattataccctacatgttaaatggctcatgaagctttattttatatcatacttcctccgtttcacaataagtgtaacacttttcttatttggaataatcacaataagtgaaaccaagctccaaatggtaagaaaagttcactcttattacaaatataccaccaaaaagtaagaggggatcacaacttcaatacttcttcactctactttattgtggtcccaactttctctctctaaattccttggtaactccccactttctctatgtttcacttatggtgaaatggaggaagtattttgtagtggtatttagctactaggccttggatgatatacaatcatacaatgtatttatattcacgataatttgctgcccaccttgattaccatgatttccaccaattttatcaatttcagtacttcaccaccccgaatttatattttttatttccaaccttggtatctccatttgtctgagtgcccgatccatttgtatcgcctccagaattgaagaagcttcctgcagctagacaattaggaaggttaaaaaagtttggagatggtggaggatagccataataatcattgttgggaggtggaacttggaaggttattgtagggttgaagtccttgatgaagaagaattgagttcaaatgagaggaaaaaggagcagggaagagggacaataagaaaaaaaagggtaaactaaaatcacgtgtaaggcatgtgcagatcaacatcagaaagcatagtcaacctactggtattagggcactgatacctttttgggtcaaaatttttttacaaggtatttcatgaggtagttttgtccatttttttttttacaaggtatcgtctcattttttttttatcatttagtttctcgcaataagtgtatttcatgaggtagttttttccaaaatttcctcatttattataaaatacctcatcttttccataaataatgcaatgtctagacttttacgctgtttacacatgctcctttgaccatctattgacacacaaggaaaaatagagtagagtcatgcaggatcttgttagatttttctcgatatatactttcaaaagatcaatttttttataattttttttttgaggggattttttttttataattatgtacttatcaaaggtcaaagttgtgcaccgggaagcataaaactctatgtgttgcaatttacatggaaggggaggagtataataagagaaaattatggtaaaaggttcattcctggagatcatgagaaaggaagtagaaagaacaaaaaagaacaatgggagtgcttttcaatgtttgttgtacgtagcatttattcatttgctataatgttttgtgacattgtagtggacttgctgccgcatataagctaaagtcccatggcttgagtgtgacattgtttgaagctgatactagagctggaggaaaactcaaaactgttgcaaaggatggtttgatttgggatgagggggcaaatactatggtaatgtttttgattattgcaggtcttgcactttagcgcacaattaatttctggatttttttttgtactgtggtggttatggtcatcaacatgtctcacccactgtgcttgcagatagagagtgaagcggaggtcacgagtttactcgatgatcttgggcttcgtgagaagcagcagtttgtaagtctttcattatctgaatggcacatactttatttcgaaagattgtaattgccttttctttctagatggcttcatcttcatgttgctttctgattcagtttcgtggctaactttccaagtttgtctgattgctaactctgtcatagccaattgcacaaaacaaaagatacattgcgagagacggtcgtcctgtgctggtaagtttgcttgttttacttttgacctcttttaagatctttcaactctggagcctggaaacatggtgatgcaggaggcaagttctctctattttacatcctttcttctctgtatcttatgacatttgcctcttattctgtgcagataccttcgagtcccattgcacttctcaagagcaatatcctttcagcgcaatctaaggtcgttttatgttaagacatacttgatgctgagagtttattgaattcttaaccttcttcttattttttttttatttttttagcaaaaggtaagtatattgcatttaccaaaaaacagtatgtacaccaccacagcagccatgtcagaatctagaaataccaccgaaaaaatcctacacccaaccagagacagttatattatatcctactcctaagtttctgtacccaatttacatcaatattggtccatttacaagatatttttataattcacagaagcacatcagttttaattagtttaataatgacctctggatgaataaccaactcagaccatatagccttattcctggctttccggaagttgtacgccagagcagcaagcacagcaatgcaaacctgtttcttatacctccttttatgtgtcttagcccatctcttatagctagtgaagatacagtcgtgtgcacaggattgaaccccaatccaactagcgaaagcctcacaacattatgactataaatacatctgaagtataaatgctgcacctttttctcctcttgcctgcacggtatcagaacaaatcccagctttagctaacaattccctggttttcagtttattcaatgccatcatgcaagcaatgaaagaatgttttggaacattcagtttgttccaaacacagtgagagcaagggacctttcctgcagttccacttagccacttatatccctgactaatagtatgactctttgcaccgtaaattgatttcaacttaactttttcataagcagtgaattgtgtgttgttagagtgtctagctgtctaggagattgggagaaaaggagggaccaaggagatagaaacacacctttgtgtttctttgtgtatttactttttagggtgggtcacgttttctgagaaatttgggaaaaggaagaaatagtaacacactttcccatttgtataacctgtatactggagctccaatataatttgcatttttttttgagctgcaagaatatgttgacaaacagttattgcttcttcctcagctacaacttatgttggagccattcctttggagaaaacgctatgcttctaagatttctgatgagcatgctcaggaaaggtaatgtcaagacatgtgttacctcgccttaattttcgttccaggaggtgagcatgcatttagaactaaaaggcacaaagactgttggtggtcttgcctgttcaaatataatggagaggagttttcgctacatttaccctctcttgaagtggggttgaaatatagcatcaagttgaatgcttgattaagtttaaaggacttgtgtaactctttttctgtttactgtgattacatgacctggttgattaacataatggtctgtttatctgtagtgtgggtgagttttttgagcgacattttgggaaagaggtaatggtttaccatagtatttctgctttagtggtaaattgtaatgttgctgataattatacttcgctgcagtttgttgattatctaattgatccttttgtcgcgggtacaagtggaggagatcctcagtctctttctgtaagtgaacattttgtgcttcactcccaattttttggaggctggaaatagattcttttccagttgttctgtcaaaaatagatgtagctttattttgaatttgaagttcccaattgttcattttgactattactgattattgctaagagtggcattatgctattatgctcctaaaagaaaggtgaattttgacctacatatagtataatgtatcaatattggtttaattgtttgttcttttgttccttttggtgctcatcttgcgccttgttctcatcgctcgttttttcatgttgcacttgatttaaatttgctcagcttaacttgtctttttgaatttatattacttattgctatattttactaatttcgttgaaactaattttttgctgaacttttcgttttgttgaaatcatttttctgaattaacttgattttcctgaatagaattgaattttggtgatcttaccttttctgcagccttttatttctttcttgtcctttttccaatctcatttttttatatttccattgtgttgacatcttatcattaactgtgcagatgcgtcatgcatttccagaagtatggaatattgagaacaagtatggaccataagacgtttattttaatcgacatgtatgtttcttagtttatacatatattaattctgtggtaaaaaaaccgaacaagaatatctttttttttttctatcatcaaaaagggtgaatatatgtagaggaaaaagatttgaatcaagatattagcctaaagcaataataatgttagtaatagctttaataacaaattcaaaacgtacattaatgaaccgagaggccggaaaatagttaaagtgaccactaagagaagcgaaggattcatgatgggttttcaacccagtagggcaaatttgttcaatgttctttacaaatcaagcttattaccttgtgggtgtttttgctagagatgaatgatagaattttccctagttggaagtcttttttggttactttatgggagctagtgatgtaatttgtttcgccttatggcatttcctaacatgtgcttttgtgatgtattgaagctttttttttgccttaatttatgctggattttaattttgttctttgtttcatttttcttgcttttgaaaaaaatatatagatatgtatatattaggattggtcgaggattttgagggaagggaaagacctaagaaaacttggatgagggtgattgatagtgatatgagtctatttgggatcgaagaaaatattcctttggataaggtgtagtggagggttgagggagcaaatttatgcagattagcttgacttaaagtttttctttttgattatttttcatttacttgtgttttgcaaacatttactcatgaatgatgtaaacttcttcaaccaaatctctggaaaaaaataatctacatggaaaaaacattattaatgttaacttgacagagatcccatccttgtgaagcagctagcaattaggcatctaacaattgacattttaatggacaggatagaatgtctcttgatagtcaataccctctgtttcattgtatcccatagctactaatctagtttgtatctttccaaagaaccattattttgaagtttcaccttgaacacccattttgaaccaatatgtttcttgcccttggggagaggggctaattgccatgttttgatgcggatgcaaagacacttgttctacctgagcctattgacttgatcatggatactctagggtttgaactcaagggaaagaatcaagtcttggcatgtgtggtgacatggcgtggggatggagtaaagaagagtcatagttctgttaggatatgttcttgcttgctacatagaatcgtagttctgttaggattgctatgatattatatctagtagatagattttatagttaattaggataaacatgtgatgatcatgttataataggcatgtgattagaggataggattagcttaattcttatcttgttgttagtttaattcttatcctagttttatgtttatcttagtcgaagttgtagccatataaagggcgttccattcattaataatacttagttttgctttgtgttttaaacatacttcttgattattgtttgcttgtgagctaactaatcaaaccattaaagacttttcaggagttttagtgctaaacatcttaatttcaggagtgattttaagagcgtttagtgatcttgaatcaagaaatatccttgttcttgttcgactaatatcagtggttttgttcgagttcttggagttaatctcttcaagattcttattcaacttgattgttgagcttattggtttagtaatcatatcaagtggtatcagttttccagggaggagaggatagataggattctctttgatcaacaaagatccaagggctatcaacaaggttcaaacattgctgcttgttcaagacttgatctttttctaccaagatgcattctttacgtcacaaggtagtaataacaagattaagagtggtttttacatccaagaatcaatctttcacgtccaagatttcatctttcacgtctaagattcattctttaagatcaagaaagttataacaagcatagaagaacacataaccatggagtccgagatggacaagcttgccaaagctatgcaagcacttgcaaagtcgcaaactgaatcacagagtcgactcaatgagaatactaccacaatcaatgggattggtagtaacatgaataggttggaggcacgcatggatgccattgcaaccatcatacaaaagaagcttgatcggaatagtgccaacttcataggtgccaattcagaggaagagttggcagaacgtgaagaaagatcatccaagactacatacaatgatgatcgtggcttaaagttggatgactataatggagatagcaatcgagaagacttgttacagtggattcgacaacttgagaaggtatgtgattatagaggctttgatgacaagaaaagattcaggattgcctccataagactcacgaaatatgctggaatttggcttgaaagcttcaaggcacaacgagccaagaaaggtaaagaaaagttgtgtagttggacaaagttgaaagttcaagcttaaagagaagttcttgcctagtgactatgaacaaaaatagttcataagactctctactataagccaagacacgcttagtgtacatgagtacaccatggaatttgacaagctagggcttatatttgacatagaggagaaagaacaatggaagattgcaagatacatcaaaggcttgaaccgccacattgccaagaaggtggaagtatccacttatcacacctttgaggatgtgacaaagttggctaagaagtttgaagaacatgagaaggaagagaagcctaagagttcttacacgcctaagtatgatactaatgctaaggccaaggctagcttcctactcaaagtggtatgaaggacctaagaggctaagaacctcaccccacctaaagaagacacaagagttgagaagcctaaagtcgtcgttccaaaggagaaatttgaagagatgagaaagtgcttcaagtgtcaaggaaggagacacatagcaagcaattgtcctaacaaaagagtcctcaccatgagacaatacctagctttgcaagaagaggaggatgtctattagttcgtccctgatgaagagcaaacttaggggaagaagaggaggaggatgcttttgctgaggatgatgcaaggctagtaggggtcaagaggcgcaccttacatgtcgaccatacacctagcatggagcaaatggaaaaatcttttccacactagatgcaaggtaggtgactatatatgtaatggtataatagatagtggttcttgcactaatgttattgtatctgaggtagtgtcaaagctaaacttagctacaagggcacaccctaagccatacaagttgagtttgctagatgatagcactggcatgagagtaaagaaacaagctttgatttcattctctataggggttataaggatgagttatggggtgatgtattgcctatgagtgcatgtcatctcttgcttggaagaccattgcagtttgataaaaaggtcatccatgagggggactctaatgtgtactctgtgttggttggttctaagagggtatgtttgcatcccttagctcctcattcagtggcgccaaagcaaccacctaagacaccaagttactttctatcttcaagggagttcgaacaagaggtggaggaagaaggttgtgcttatgccttgattgtaagacatgctgccacaagtgtcaagactactagcaatgagaagctcgaagccttgatgaaagagtttgaggatgtctttctagaggaactacgacccttgagaggcatagaacatgctgtagaccttgtacctggcgcccctttgcctaacaagcctgcttataagtgtgatccagtggcatctagggaattgcaacgccaaattgaggacctaattgaaaagggctatttaagggagatcatgagtccatgtgttgtgccagctttactagttcctaagaaagatgacacatggaggatgtgcatagatagtagagcagtgaacaacattacagtcaagtaaaggtttcctatgcctagattggaagatatgttggataagttacatggggcatcaatcttttctaagattgatcttcgaagtggctaccaccaaatgaggatcagagaaggtgatgagtggaaaacaacattcaagaccaagcagggattgtatgagtggatggtgatgccatttgccttatgcaatgcgccaagctctttcatgagcttgatgaatgaggtacttcgtccgttccttaacaagtttgtggttgtttacatagatgatatacatatctatagccaaaatgtggaggaacacttgttgaacttgcgtagcttattcatgaagcttagagagcaccaactctatggtaagattgatggcgacgaggttgacgggggattatggcggcagtgaatcaccctctttgccggtcactgaaatacaacctgaggtatctttaaattctgtaattggattgactaacccaaaaactatgaaattgctgggaaaaattgctggatgtgaagttgtggtgatgattgaccctggggcaacccataattttttatcactagctactgttgagaaattagctattcctgtgtcggaatcggaaggatttggggtttctctaggggatggacaggcggtgaggggtagtggaatttgtagaggggtgttattgagtttaaatggtggagttgaagtggaaacagattttcagcctctgggtcttggtaattcggacgtgattttgggtgtacagtggctggagacgttggggacagtggagagcaattggaaaacacaaacaatggggtttgaaatcgagggtgtcaagttcactttgaaggtgacccatcactggcgaggtctcgaatctcactcaaagccatgatacgtaccttatgtaaagagggtggaggtttgtggcttgagttgaaccagattgagcattatcaggagaaaacaccgcattcatcagccttacctgaaattccagttttcttacagagagtccttacccaatttcagtctgtgtttgctacaccagaaggcttaccaccgataagagaacatgaacatgcaatagttcttagagaagggtgtaatccggtaggggtaataccgtaccgttatccacagttccaaaaagatgagatagagcgcctcatcaaagaaatgttggcttccggaatcatcaatccttccacgagccctttctcgagcccggtgatattagtgaagaagaaagatgggtcgtggcggttttgtgtagactatcgggccctcaataaagaaacggtccccgataagtatcccattcccgtgattgatgaattgttggatgagcttcatggggcaacacttttttcaaaactcgacttaagggccgggtatcaccagatccgggttaaggccgaagacactctcaaaacagcttttcgcactcatgaggggcattacgagtttttagtaatgccatttgggttgacaaacgcgccggcaacgtttcaatcccttatgaacgaggtcttcaaaccattcttgcgcaagtttgtcttggtatttttcgacgatatattggtctacagtagttctgccaggaacatgaggagcatttgaccttggtgttgcacaccctagcagctcataaattgtttgtgaatcagaagaaatgtgattttggcaggtcggaagtagcatatatggggcatatcatctctggtcaaggggtggctgtggatatggagaaggttcaagcgatggtggaatggccccttcctaaaaacctccgggaattacggggatttttgggccttacagggtactaccgcaaattcgtacttcactatgctcatatagccaagcctttaactgatcaactcaagagagatgcgtttgggtggtctgaggcagcaactcaagcctttgaaaagctcaagaaggcgatgatcacatcccctgttttggcaatgccggacttccaagagttgtttgtggttgagaccgacgcatccgggtatggtctgggggcagtgttaatgcaaaacaaccgacccattgccttttacagtaagttgttaggtgcccgggctcaattaaagtcgatctacgaaatggagttgatggccatctgcatggcagttcagaattggagatattatctgctgggtcgacatttcctcattcgtacagaccaacagagtttacgtcatctcactcagcagcgagaagtaagtactgccttccaacgttggatgagtaaacttatggggttcgattttgaaatacagtttaagccggggtgtgccaaccgggtagctgatgcattatcccgcaagacagtgggagaggttgaattgggtgcgctgatattaactcatggggtggactggaccgacttggagcgtgaaattgaaggcgatcctctgttgtgcaaaattaaacaagacttccacgggggtgctattactcctgtgcacttttctttggtggacaacaagctgttgttcaagggtcgatacgtgattcccagctcttcggtttttattcctaccttgctgcgagaatatcacgattctcccattggagggcattcgggggacctcaaaacatatctcaggatggctgccgactggtattggaggggcatgcgcaaggatgtggcgcggtatgtgcaacattgtagcgtgtgtcaacaacaaaaaatgtctcaacagatgccagggggggtactacaaccactccccataccttcctcggtttgggatgacttgtcaatggacttcgtggaaggcttgccatcttccaagggggtaaacaccatcctcgtggtggtcgatcgtttgtctaagtacgcccacttcctcccactacgtcatccatttactgctgtgtcggtggcaaatgtgtttgtcaaagaggtggttcgtttgcatgggtttccttcctccattgtttcagatcgggatcgaatttttatgagtgtgttttggcgggaattatttcgtttacatgacaccacactcaaacgaagtaccgcgtatcatcctcaaacggatggtcagtccgaaatcgtcaatcgagctctggagacttatttgcgttgctttgtgggggaatacccgcgctcttgggctcagtggcttgggccgaattttcatataatacttctcctcatctctctaccaaaatgaccccgtcaaggtcctttatggtagagaccctcctactgtgatacgggttaatcggggagcctcacctgttgaaagcttggaaaacatgctccaagagcgagacgcagtattagatgccttgcagattaatctgattaaagctcaacagaaaatgaagagtagtgctgatgctacaagaagagaggtgcattttaaggtgggagatcgagtgtacttaaaattacagccttaccgtcagaaatctttggcttaacgcccttatgagaagttagccgcccgtttctacggaccatttactattttacagaagattgggcaagctgcatacaagttacaacttcctgtttctagcaaggtgcatccggtgtttcatgtctcccaactgaaacaggccgttggttccattcccgtttcagccactattccagagcaattgtcttctgacttggagttagaggtggaacctgatgaactcctcgatgttcgtagtgtttctagaggccagcacacttacttggaagctctcattcagtggcagggattaccatcattcgaagctacctgggaagatgtggctgctttccatcaccattttccatccttccaccttgaggacaaggtgaaactttgggggggtggtaatgtgatgcaccaaactaccactccactactcacctattagaggcgtaagaaaaagggggtaaatcaggaatagtttacaaattctgttgaaaggaatattttgtaattatgatgtcagaggttgttagcaaaaaggcagtagagtaacaataaaaaggggaagggaggagagaagaaggtattgagatttttgtaaggaacttggcccttgggagagttgggagcctctcgaaagctcaccattatcttgtgaatattttccttcctggttatatacaagaaccttcctctgtcaatttcttttctctctaatcttatttcttattctgttttctggttgccattgtttgaagttgcttgttgtgcttgagtaaatacgtgaagtggtgaaacccatctgaattcatcacatctattccaagtggtataatacaagcttgtaatccaaatctaatgagaaatctaagttatgaagaatttcaaaagaactaagtacccttgttttggatgcccaaggatttacttgccgctcaagttaatgctcaacgtgcaagatacaacctctttagtatcccaaggtagtttccataagaattaattgagctcaaatcaagaacaatatttttatgtattaatgtgaacacttcctgaattatattagatatatggtctgaaggttggaagaaagattagcttttaattttaagtttgagatagtttttagaatcgaggaaagattagctcttaacttgtaaactaaggattgctttataagtaaaacattagttatggaactcttaaaattggttttgaacatttctagttaaaaatcccatgtaattctcccaaactagcttaaaatctcacatttcacaagctaaggagagacaaatggcgttctcttgtgaaacaatctaaaattttcattaggctactgttttcaagtatttatatgttagaagtgccgcatataggtacataaaataagtttacaaacacaagtaggaataaggaaaactaaaagagaaacttcagccatacaaaaccggctgaaatcagctactactttctactttctagcttcaaaatctgattgcaagtctcctttaagccaatcaccaatgaaaacctttcctccacatgaagtgtgctcaaatcaagagaagaaacccatcattcgcctatagctacctgggtcagatgaagatacggcaaaaaaaacgctggaaatcagtgaaccaaaataagcaccaattggatgctttctgtccttgctacattttcttctcataggactacttcaagccatacatgaataagcagttagatccagctcctagcatccatttgatcgtacaaatgagctccaaaaagataagtaaaaccaagcagccaaaacctaattaatactaatgatgaattagttgaatagctaatgacgatgaagcaacactttagtaggaatagtgttaattatgatcaatgctacttaatcttctgattaatttttggaaaaatgtcatatctaccttctgtatacacttattcataactatatcgtattattattatttttaaataactaccttttaagtaccaaaacctaagaaatcaggcacttgatggattccatccaaagatccatttggcggggcccactaactgacttttgattttttgcctttcctcttttggttaatctcaatggttcatcaataacaactcaatcttctccccatttcatcaaatcatccctaaatcagaactttttcaaattcacccaaatgaggttatggaaacctctaccaagtttattcgaccacttttagtctagctcaaagttttacacttgcttcaaaaactaagatttattaactttagaaattaggtttttatttttattttttatttaactttgtaacaatcttaaataactcaggtgctttctagagtttggctttaattgtttttcccttggttatgtgaaagaagtatgactactttctccaagactaaagtagagagcaaaaaatgcaattctggaatttcttgcaaaagaaaaggaacgagttaatgataatgaaaaacaaagaaaatgatgagaagagaggagctgaatcaatcatgatcatgtattttaaagttttttttgctattgaagtgacttaagaagaggaaagaggatgagtgaagacaaacaaaagaaaggataaatagagggaaatcttgggcttagaaaggtgaaaaggtaagaagatgagttagtgggccccaacaaatgtatctttggatataatccgtcatgccactgtttggggcttgcttaagtccatacattacttcactaattttacaaaatttattttcttgaccaagaactgaaaaaaccttcagtggtgatctattaggttttggaagttaaaaggtagttatttaaatgtttttaatataaaaggtagttatttagatatttttaatataaaaggtagttatgtgaataaaagtgtatataaaatgtaattttttgacatttttgccttagtttttcttgctaattcaccttttcaacttgaccaagttgctatgaggagaaaacgagcaattattaagcaaatcgcaacactagcattaatccatggcccatgaaactctccataattagagattggattagcacttagtagaacttcttgctcctgctccaggtttccattacttctttatctaagtgcatcaaaaggttgttgggttatgaaaggtggtggttgtgtatagtcattgtcaaaatgttgttaatgcactctatttagaggatgagggattgaatagttttcacctcgtgacctttcattcctttttaaaaaaattgataatgtgtattggtcctatgactgtatgaatggtaataagctatctcatgagctgttactatcttcctcagagtctaggtagaagggtttgggctgataattttctactatgtgcaattagtttgttggatttggatatgctagttgatataggtcctttcccttgggccttctcttaatataggcctacagtgtgattgaagataaatcttctggagaatataagaacaatgagatggattggttagaggttgatttgttcttttggtgtaagactatttcgggttctctattggttatgttcagacgccagaatatgtgttggtgattgttttccatgaacatactttatccgcagagacatttttcttttttcttcctataagattatatttgtttcctctcttggtgctcatctcagtgtctctactttacgttaaactgttgacattacttgacaatgcgtatatttgtcgcatggtgctcttccctcactccacgtcgaccccatacatcaaaaaatgccattaaagaatattcgaactcacaaccttgtgttgaaagaatggaatccctaccaatgactcattaattcattttctctttaagaaataaatgatttcctcacaaacttttaggctttaagagcccaaaagataaaaacataaaataagatagacatcaacgtcaagattagccttaaatgcacaaagcacatgtcaaatgattgataactactcacgagttgcaactctttgggcgttgcctaatattaattggatctcttttaaaaattgttggtggttatggttggtggagaggaccatgtaacttttagctggtcacaactggtaatgattgtcacttttactgcccataaaaaaatttaaactgttgaatatgtttctggcagtggatctgacaaatcctttacaagttggcgtccattttgttttgccatgtgactcaattataatacgtgagttttattatccaccaggtttggctcactaatttccggattaattcaatctaaactgtctccaaagaaggaaaagggtggaggaggaaagccttcttctaatgaaaagacacgcatacgtggttcgttttctttccagggtggaatgcaggtattagcatgtagctttcattctgttaacatttgtggttcttccagacatacatccaatgctttttttttttcttgctataaccataaacattcttgtcatgaacattctttaatactgttgctgagcttagtgtattcgttcattcatgtaatttcctctcttgaggttaaaatggcatacagccttacaacctatatccataatgctccttagagtagaatccctaggttataacatagtaccacttatcaaaataaacatggcacacactgcaggacaagaagtaaatccacctagagaactgagcacctagtagtaaaagcagcgatacattactaataacagtagcagggccataagagtagtaaatgggcctcatttcaacactccccccgtaatggtgagagagaagaagcagtctgaactcccagcttggagagcaaaatagagtgttgctgaacagggagaaccttagtgaaaacatctggcacttgatcttgagatggaacataggtaggctgaataaccccttcttcatttgtattgtccctcaggaaatgacaatctatgtctacatgcttggttttctcatgatgaactagatatgctgctatggcaagagcagcttggttatcacagtagataggagtagcactggactttttaatgcgaagatctttgaggagttgtttgatccacatcacctcacacacagcaagagccatggatctgtactctgcactgaccacaagaaattgcctctttgactttcaagatacggggggagtcaccaaggagcacacaaaaccagatgtagaatttacaacacccatcccattcactatcacaaaatgctgttagttgagcactagacttgttcgccatgagaattcaccctgttggcagcttgaagatgcacattagtggggcagtgcataaatttgcttaaatcatgtatagtgaaggcaatatcaggcattgccttgtaatagtgagataaatgagcttccccatcaatttttgatacacatcaggttgttgaagaggatcaccattgtcagcatagagcttgacatgtgagtccatacgaagcctcaatcgtctgcaatttataaaaccatattcatcaacaagacccatcacatacttctttagagataaaaacgatacttcactacactgatccacttcaatcctcaaaaaatatcttaggccacccatatctttcatgtgaaattggccagcgaagaaactctttgcttcctcaatagttgctaaactattgccagcaagaatgaggtcgtccacatacaccaatatagcactgaaacagtgagagttttgcttgaagaatagagagtagtcacacttggattaagtgaatacattttgctttaaagcagtgttagcttggcaaaccattgcctcaaagcctacttcaagccataaagtgacttaagcagcttgcacaccttagttcatttggtgtcacttctgccatcagtacttagctccccctctccttgaactttgatcctgttacatgtttcactatatcctggtgatagcttcatgtatacactatcctacaattcaccatgcaaaaaagcatttttaacatccatttgtttgcaagaaccaaccctctaaggatgcaacaacaagcatgtggtcatctttgctacaggggtaaaagtctgctcataatctattccatatctctgtctgtcacccatgattacaagccttggcttatgcctattatttgtgccatcagtgctgtattttgttctgatccatccatgtgagggatggctcatttctacaaaatcctagttccgttaggatttgtgttgttttcctaattctagtaggaataggactcctaaaatcctaatcctcctagttctgttaggagtttaaaagttttagtttgattgtaattctagttgtgttagaaatccaaatcctagattcatgtcacgtatggttagaacatggctagtaggataatttgtcttgtgatgtccatagccttggcatttgtggcacctaactttcaatagcttgtcttctgtctccttttctttctccttctttgaggaatcaacgtttttagagctatctaaaccactagcatcaatattaggtttaaaagtgctaaaagatttcgaatagttcttacttgcatacaatttctttttctagtttatgtagcgtcaccagggaacaaaaactcggccgttccgttctggaacggccgctttgtaacggatttcagagaggccgttccgttaaataccgttctagaacggtgatttggaattcacaccaaactcggcgcgatagcgttacgtaacggtgtaacggcgttccagaaccgttacaatcacataacgtccgttatttgaagaagaccagttcttttggtggaggaagaagaagagccaacgcaagatctatagatctgagttaaaatttgaaaataaaacatgtttttttatttaaattaaagcttacagaggatgtagaactcaaattcgagtaaacccctcctttaatttcattaggttactgcaaatcgaaccctaaattgcaaaccctaatttcgaaaaaaccctaatatgcattgggatgcaacgctgcttctccggtcatggcagagaaggtcgacgagtcatcttcggctgcttttagcactgtagctgccggtggttggcttgtttgcaggttagtgcttgctggttttctttctctcataccgatcatcttcttcttttctctcttctctttttcttttttattgtgtgactgccagtcacgtgataattgcaactcataaagtatctctttctctctcttcttttcatccctttttatttttctttcccttttagtttttattccctcacgtggaatcacctaattttcatccttttttatttttttagttacactcttacacagaagtatgttcaaatatcattatagtacctcaaatattgtatttataagagttttggacataatatgatatagaaagtaaaatagaagaaaaataaagtttaaatgtcacttgtgtgatttttttaaaaaaattcacgccgcgacggccgcgaaacgttctatttcccgttacaagccgttcccgcgataacgcgaccgttcccgcgaacgcgaccgcgaccgcgttttttttccttgagcgtcacatcttgcaagcttcttcaaaggtgagttatgtgtacaactccaatttctctccaatcccctccgtcctcatttaggcctccaaggaagctacttaaacattgatcttcaagttcatcaattttccaaagaatggataacttctcgaactcctttatgtaatcttcaacggacatattcccttgtttaagagtagaccattccatgtacaagctttgtttgtagttagaaggaacaaaacgtcctcttaacaactttttaagcttatcccaagtagagattttgggtttattagctttcacacgctgcctctttactccatccaaccaaatagatgcatatttggttaccttaagcacggccaccttgtatttcttttcttttggtgtctcttaatcccaagtagagcttttgcgtgtgaaagctaataaacacaaaatctctacttgggataatcttcttcttgtttccgaaacaactaattcttatggtagttaggaaagcaagaatggtttctaattcaatagggaatatattaattattattagtttaagttaaatagtgcacgaatctaaatagattattcgtctcaaaatctcacttaagtatagatttgtttggacatctgagggaagaagaagagagcgagataaaggagaattatcactcaatgaatccatatcccgagttttcccatttacttctttgaaagcaatatagttcacgaggtcttattatcagtctatggacataagagtaataatttaagggcaaaaactatgactttatgggtttaaactgatacatgttctgttaaactgatagatgttctgtgttaaaccgatactcatatattcctggttaaactgatagatatatgatttaaattgatacccgtctcagtcatgtcttggattgagacggtctgacacaagactttttgtgtattatatatctgattagaataaatttatcctgtttactaattattttatcttctccagacacttgttgacacaatatgcaatcagtttggtaaagatgaactcaaactacagtgcaaggtcctttcattgtcctacagtcataaggggatcccttcttcagaaaattgggtcgtgtcttctgtgtcaaaaaattccattgaagatcaacaatatgatgctgtcatcgttaccgtgagttttactttgcttactgctattgcaccaatctttcttcttttgacacactgataatggcaatgctgttgtggtttgaagccatgttatggggttttagggatatttatggagtctgatctaatatgttattggataaaattcagatctgtaacgtgactcaatgagattgaaaaaaattgaatcaagataatggattggaaaattaggagctaacctagggtctataagcgatccacttggagtctcataccaagcaggtattcgacattttaggtttatattgctgctatggctcatatgggagcctacatagggtctggtgcttattcctttttcttttgtctagttttggggctgcacatttctgttgtgttttgatatggatagccatcacctgcaattgcatggaggctgaactaagttctataggggagcaaacagtatctgttggaaatttattttcatattgtgtttttaaatgctataatccaaaatttgttgttcccctaaaatgcctaaaatacccttatgtaactgctccatctgtcccttaatagacttcccatttctccaatgcatgtttgccaatacacattttgtattgttaatatcaaaaattacatattagtaaaaattataaaagtttgattttcctaatgtacgcaatgagacgaatcaaacaagacgccatatgactatgttttttcttatacttcctatgttttttaataagtgacatgttttccttttagggaaatgtcacaataagtgacacatagctcaaagtagtaaaaatacttctcatttattacatctttgccattatttaattgtttcacctacctactttatccaatactcaaatttgattggttgaacaattggtcccaactttctctagactccttggtattccctttcccccactttctctctgtgtcacttattaaaaaatggaggacgtatattggaaaaaaattggaaggttttcttcacttatgaatagtggtaaaattagagatgggaaggctattttgggatggatggagtaatatttaaatttttaaaataatgtcattgttttagtgatgaaataaaattcaaggctattttttctagtaattatgttatctgtacatcaccacacgtatcgcgtgcatataagactagtttgatgatattccaacactgttcgaaggaagtcaggcatggaaccatgtttgcttccatatgggaaatattttgcttactctccttcaaacatctacctcattatcccagaatgattgatcgaatctaatacaaatatacaattgatcatatgccaccagggaattacatcaaattaaatttttatagaaggggaatcagtcatagcctcatagggaacgaataagtgatactcgccagtttctttcctggttacttttcctcttctcactagccatcctttatgtatgggtatgctgcatcattcctgccactggttgggactcccgtttgaactatggggggatgggaaagctaagccatcatcttcaaattgagtttcttgagaatgtaagacaccatctgtaagatgaatatagtgcactctatagtcaatgtcatgatctttatgggtttatctgctgaaataactgtgatatacccagctctccatttacaaagttttcctacatattaaactcttgcccgcaattctagaacttcattgtagaacttttcctacataagcatcatttgtcttttctgtagtaaaagttagaaagagctttattttagaacattcgtttttagttttctttgttgttgattactccgccacttttaatacttttatgattcaagtatttgacaaaatcatgtaatttaggtcctctgctgcatgcagtctataccctctctctctctctctctctctctctctctgtggttgtgtcttacttgttgagttactaactccagccattacataaagtaggctggcattatgatgagcaaattactcaagaccacatgttagctcctttttcttttctccttattctgaaaggcaaatataggtccatcttggtgcttctcatgtcataagtaagctgaccccctccttttccagggaataggacaataatccaaaagtgagggttttacatgttgggatttgtgaagtttcttattttacttaatagccgagtcagtgttacaatacatagtaccgtgttacaaaatagtatgtaacaccaagcatgtttatgtgcaaaattgtgcaagactttgttgctggcacgccaagggctgttttaatgtagtttacttattcttttaggtttttcagatgacaatcataaagggaattaggagtgtttttattgtagtcaatccctattgtgctacaacgataaaagaaaaaagcacaagactagaaggagaagtaatgtctaggaaagactcctcacctggggttgctagtcacctacacatcttagaaggcatcaaaccaaagcttattcccctcgactgttttcgggagaaaagaagacaaaattgtttctaacttatactttaccagtttcactacagcatcagaaagaagcaaaatatgctcccacaacacggcgaacctagctttccagatgtgataaaccagaccagcaaaatgattattttcactagagctttgagtctattttttcggtttttccccttcttcctggtaatgtcacgccaccaagccatcatctcaattttttgagatttgacgtaatcgctcaaatagctgagtaagacacttcttgctctaaatactaataaaaaagaggtgaatgtgggtctcagccatgttactcaaatcggataaagtgtctactcttattagggtttttgggtgttggactcatccatttttttttgtaaaatgtcaagattttggtttgaaatgagagattcaagtgtcgtgacatgagtcggcacgcaacacttaaacgtgtcgaagtaacagagggtctcagacaatcaactttaatcaatcacgaaccccaaaatttatgcaacctttgctcatattcagtctctgtaaagcactcaactgcagcacacccacccattcgcttcacctacagcaggagggcacccaagtaattgctatgatgagcgaattattctgttttgccttgctggaatattgctgttagatttgctgactcactggcagttaattatagtcagagaatgagaaatatcctgtagagagagaaagggtatcttttgtatttagctctataaatagctaaggaagggaagggcattgagagtttatgatattataataggagagatttagcctctcgaatgctgataggagcgtagctcttgttggattatcaatactactctgtttgctctatctatttctactcaggttccttcttgtacagtggatccctgattggatttacttcatcaaccagcagataaaattatttgtaggcacattgaaaccattccaaacctaatgaggccaaagtttatcacaaagaatataggagccaaatgtaggcaacagataagagtataattgccagaagttgaagactccaggtattgttcagaaaccttaatgcatatcatcattctgacactagattttccccggagccaactaacaaaaatgaattaaagagattaaggctatgtttagttcacctgaaattttctgatctgaacttatctgatctgatctgaacttattttttctgatctgatctgatctgatctgaaccaatctgattacaagatcttatcttttagatttttctcaatatataagaaaaaatatagtcatgtggggtcttgtttgattcgtctcaatgagtactttattaatattcaattattataatttttactaatatgtaatgaaagatataatgatttttaaatataagcatgatctgaactgatctgatgtgaacttattttttctgatctgatctgatctgattagatctgaaataagcaaaaataaggtgaactgaacatagcctaagcaacaattgagggaaaataagatcattatggctaagataagataaatatgtaatgataaaatcagagtaattatatcagttacactctcaacattcgtcagattgaggtttcctcccaaaatgccaacccacttttctgtattttcacgtccttctctctacccttctaggtatatattacatcagctgtaaaatttttgaaccaactagtagaatactgatctaccctcaactgcctcactttctcattttttctgggcctttttctctctagcacaagtccacataagtgatgcatagcagaaatataattccactagtcatcctcaatattgatataacaaacacatcacccacatattatcatttttaatcgctgcatgcgaggcatacttacccaccaatcaggatatgcataacagcgttcctaattccaaaaccaccatatatcttgggtttgcaactctcatccctagcaacaaggggactttctgaaaaagtggcagattccgcccacaagtagtttgtacggacacctttattatattattaatatcatatttcggcaacacaaattaccagcccagtaaaacatgaattgacatgagactaacaaggggcccaatctaatatcgtacgtctgtactaagcaatgtataaaaaaaagctcaaggtgcattgatgcaatagggatcctaatgtgcataggtgcgcctcattgaagtgaggcaccactaaggataaataaaaaagattgatgtaaaattaaattgtgcaccttgggtgcgcctcgatgaactttttttgtgtgcctaagtgtacctcaagtacgcctcattgatatcgcctcgcctggcagaaaacgagcttgaccccaatcgccttgctccccaccgcctaggcgtgcctcagtcacactttttaaatacattggtattaagtactcagaatggcaaaaagaaactttgggcattaattagacatttcactttttgtgcaactatttgtgacttcagagattgatatgttttctacattacagacttttgtgatggctgcatggtctccactgtcaaagaacattagtttaagtagaagaaatattgctctattaccttcctccctctacaaacaaaatcctaaaatgtggttatgtagtgccaattcaaacttgtagatgcatgactaatgctttcattatgctgtgggtttttatactatgattcatgtccaattacataacaattagctggagtcaggatatgtcacggaaattttaagcctggcaggatgattgtttatattttctctttttcggtgtttaagtcaaagtaaacttctaggctgctcttttataggctagttgggctgttggggagatctacacattaagtgtgaagaaatcttgtctaactccagtttggttgagaactgtaagctgtcataacatttgttgcatgatgaggccttgtgggattatcatgttagctgtaaactctaaacttacttgaaatctagtgttgtgtctccttatttctgtagtcaaaattgaaccttctgtacgtttttgatacctgcgactagaatgatggaattctgaattactgatactattacaaccatctgctaagaacgaagatgactcttagctaatttctcagcagatttagagaaattaagaagaattactaatgaatatttaaagagaaaactaccaagatatgattgtattgatgaaaaacaccaattacaacctaaccaacattcgagaggttggagctctcccaagtaaccatttctctcactaaacttatcaattttcaagatgccttttccattctcagttcctctatatttatactactccccttagcaaactacccaacttattccccaagtaaactaaagagataatatctaaaatacccttccccctacaataatattagttcttagcattaccggccccctaaacttccaccttgtcctcaaggtgggtcgtaatcatcactaaattctgggcctctactcgtatattcagtgtcttgcagcccttcaggccccaagcctaggttatgcagctcgtgttgcggctcctcctcatatagttctctggctggagtgagtgcctcaactataatgaaaaagtcctggaggtggggaaggaaggagtgtctgaaatggtgtggtgtgctgctggtgttatgggcttgtgcctgaaagttttgggtttaaagagatggagtggagaagagtggagaagtgactggagacgtaaaagaaggaatcataatttttgtaagtggtgggttgaaaaagttggtgggaagaattgtttttataaaatgtagtgtaatggtcgaaaaatgggtggagtaagtatggtttttggctggggatgtggtactgggttgaaaataaataggtctgagcttacttgtaaaattggcctcaacatgagcaggcccaatatcttgagccaattccccaaaagctggcaatagagcactcttaattgcattgttgtgggccatcgggctccaaacatatattcggaggagccggacttctttggtgatgtcattagcttggcccattgcacactttcccttaacagcctcaagatcttttcccacttttgtaccccaaccacgtggcttcaccatcctttctttcttgcttttgtcacttttttggcaatatacgagtttgtccttactaccctcatcttctaatgttggcttcctcaccaagcttaatttctggaattttgtccaccaaatcccaccacccatcgtcaacaccatacctatctacaccggccaagaagcctggtcctccacccgaattttcgccacagacaaagcctgaacaaccgtcagttctctcaccggagaagttcacaggtccaccacctgacccactagttgctgatccacccttcacaaatctccctcctctggctgccacaagtagtggttcctccgtaatactcatatttctcgtccaagagccctggaccaccaccggacccacttccaccggcaccaacttgttcaaatgatacttctctttcttttccaaacagcctacttggactggaaaaaccactgcgattgtagcctccgccagatctgtagcctagtgcacctaacgtgcttccaactgcaacccaatagggatggaaatggatgggattcggggagggtggagcatcacccgcatccgtcacccgcatccattcgctccacccgctccacccgcatccatccatccgtcacccacgggtgaaacgggtgggtcggtgataaacgggtggaaccatttagggggtgtttggtatcatgtttttttacaaaagaaacagaatcaagtaacaaaatccgtttctacttgtttggttctatgttgctcagactcgagtacccatgtccgacacgggtacgtgtccaagtgtccaactcagctattttctagaattttttatattttttaacccaaaacaaagtgtccaagtgtcccacccatgtccgactcccgaggatccgacacgggtacttgaggtgaaatgaagagtccgagcaacggaggtttggttagtgtgtaaagtaacaattaccgttacttgaggaaaacacatccccccaagttgtttccattcaaaaacctaaggaaacaaataacgtttcactcctcaaacaagaggaaagggaatgggttatatttatttccattccattaggataccaaacaactaataagggtaacacttattattatcctttcccctccttatcaaaatcctttccattccgtttacggtattcataccaaacacccccttagtatattttctaatgaaatttgtgatatgatatgcatgatataaaataattctatcaaaaatataaaaagtaagtaaacttacatgtacaacttaatagatgggtgatgggttggaggttaaacgagtgatggatcgggtgacgggtgaagaaattctcacccaccactcgctttccatccatttaaattaggtttttcatccatttaaaaaaccgggttaaacaggtgatgtatgatccatcacccatttccatcctcaaacacatcccgatttgtttactgcaccaccagatccaccagtataaccacccgaaaaatcatcatgccttctactagccttgtaacctgctcccggtgagaagcttcttccacaagtggtggtcgctggacctccatctccttcttccccaaaaaattttccatgacacccactcgacccttcatctgtgacaacctcttcttcgtccacctctgaagttttggggtcgtcttcctcctcaagctcctcttgaagtaactttaacttccgttggatgggagagaacgcttcattgattatcttcaccagatcttcttgaagtttctcgaaactttttctcacgttttcctctacctctttcgtgatttcctttccgatctccttcatttttagactaggagctcttgcgattccatggcagatttctttttttaaaacaagaaaatcaggcacttaatctcccagaatagtggtgctctgataccattttctaagaaccaagatgactcttagctaatttctcagcataacaacaaatttagagaaattaagaagaattactaatgaatatttaaagagaaaactactaagatatgattgtattgatgaaaaacaccgattacaacctaaccaagaggttggagctctcccaagtaaccatttctctcactaaacttatcaattttcaagatgccgtttactactccccttagcaaactacccaacttattccccaataaactaaagagataatatctaaaatacccttccccctacaatattagttcttagcaccatcaaactgggatggatggttttgtaaggttccaatttacttctccatcaaaatattttaggattttttatctcatgtattttagagtttcctcgtccctttttatctgataagattcttctgatgatttgattttatggtaggctccaatcagcaatattaaagaactgaagattctgaaagctggagttccattttcacttgacttcattccagaggtttgtatttttatagtggttagacatgcttcccctagttttcaaagtaaaagcatccttgttgtgacgatattttttcccttgtttttgtttttattattatcatcacttatttccattttctattttccatgctgataagatgttcatcaccataatcttgtggtatcagaagtgtttagtggagtttattcactacacatgcagttgttcttttgccatgaccgccattcattttctcgtcaaaacaaatctatgaagtttggttttcagactcatggttcttgtagctcttgtgaatttttttttcttctccttgcatgcattcttcaaattacatattgcatataccaggtgctctcctttattttatatttaatttttaaaattctatcatatattttttaatgtcaaacctcaaactaggggttcactgcatcttaggcttaccaggctaatatttctttacttaaccttttccctttatatttgctatcctcttgtgtagtaatcaccataagaagggtacaaactaaattaccctcccattcttttgtatcattctgaaatagtgtcacagagctttgatttttttgccctcatttaatctggcaaatgttctctctatttttttttttttactttcttttgacgggattctcaggcaattgttacggggagcagccagtcacactgtttctgtttattatgcaggtgagttacctgcccctctctgttatgattactgcgtttaagaagaccagcgttacaagacctcttgagggcttcggagttcttatcccttcgaatgagcaacataatggactgaagactgagggtaactgcctcgttcacgtgtgtagcgaatcagattttcaaaccctgatttcgtaacattgcaggtactctgttttcatctatgatgtttccagatcgtgctttctccgatatgtatctctatactaccgttgtcggcggaagcagaaatagagaacttgcaaaagcttcaacgtatgagatatgcaatgttttaaatgtatgctatagtcatcgtttcaaccttttggtgcctttttcttactaatttatcctcctggtttaatgatcttagggatgaattggagcaaatagtttcgtctgatctccaccagctgttgggcactgagggaaaacctacttttgtgaagtattgatatctttcacccaacttaacatgatttgtgcttataatatgttaaataaagtaactgaaatcctgaaattaagactacgaaactgtatggtgacagtcatttttactggaacaatgcattccctttatatgggcacaattacgactcagttctgagagcaatagaaaagatggaaagagatcttcctggacttttttacgcaggtaatctgtcatttgcttgttgcgataaagttcatgtacagttggcatatcaatcaacttgcattctttcttgctaactccaaacaatcaggatcattaacttgtaggctgcagcaacagagagtatctcccaagttgttaggtttcatgtaacctcgtcgctgagatgaaatttccgttggctaaaaagtgaaagttttgtattgatgttacccaaaacaaaagtattttgcatgttgcttgaagttttggttgtttcagatagtacatcctttgacatgaaaataaatggaaaagcgtatgtcaagcaattatcatctagtttctttgtttctagatactagccgcatttgatcccagatcatttttgaggaagtcagctgaaataccgtagctatccttcagttttcataataaaactttaatggatctgatgtacagtaatttagtgtgcaccgggttaataattgatattaacttcatatagtgagtcttataaagatataatgaacttatatacaatatagtggattttattaatggaaaacatatagtgaaactatatgcaatatagtatgatacataaagacttagacaacaagagcattcgaaattacaaagaacaaaggaaagaacaattgtatcaaaccggttcgaatgaacaaacaaccaccacttccacaatcaatgtaccaccaatcaagactaaactataacaatgagcttctagtttaagtctactttgagttttaatcaccaattcaacgattagatgatcaaaattgcaaaggttaagagttggtcaaacctaaccaagagttacactaggcacatagctttgttaggagtatattagtttatgaattctagttaagttagaaatccaatacctagttggattaggattcctaattggattagaattatagtttagttagaattctagtaatagtaggcgtgtgattaggagatataattagcttaattcttatattgttagtttaattcttatcctcgttttaggtttatctttagtcgaacttgtaccctatataaggggcctttatttcattaataatatagtttattttgagtttaaacctttacttgtgattgtttgcttgagaggttattaatcgaaccattaataacttttcaggattgttaagtttttagtgttaaacatcttaatttcaggagtgattttaagagtgtttagattcttgtattcaagtttcaggactgatcttgaatcaagaaatatccctagtttcgactaatatcataagtagttcgaattcttggagtcttttcttcaagattcatattcataacttgattatttagacttcttggttttgtaatcatatcaagtggtatcagttttccagggaggagaggatacaaagggttctctttgatcaaagaagatccaagggcatcaataagaatgacacttgcaataagttcgagtgatacaaacaacttcaagactcgatcttttgctaccaagaaccaatcttgacgcctgaagattgttaggacaaaggataagaagtgtttctacatccaagattgcattctttacgtccaagattgcgtcaagatccattctttaagttcaagaaaggagtagaaagcattcgaacactacttaaacatgacatccgagatggataagctggctatggccatgagtgccttggcacaatcacaaactgagtcacgcaaccacatgggtaggatggaggcacgtgaccgtggattgaaactagatgactatagtggagatggcaatccagaagacttgttggagtggatttgccaactaggcaaagtgagtgattataggggctttgatcacaagaagagattcaaggttgcttccattaggctcacgaagtatgctggaatacggctcgaaggattgcatgcacaaacttcttgcctaatgactatgaacaaaaacagttcataaggctcgcatcaataagccaaaacacacttagtgtacacgaatacagcatggagtttgacaaattagggcttatatgtgacatagaagagaaagagcaatacaagattgcaatgtacattaaagggttgaatcgatatatagccaagaagatcgaagtctcaacttatcacttctttgaggatgtgactaaattggctaagaaattcgaagagcatgacaaagaagaagggcctaagagttcttacacacctaagtatgactctagtgctaaagggaaatcaacagttccctactcaaggtggtcggaaagacctaagaaccccactacacctaaggaggacactagcatggagaagacaaaagtggccgtacctaaggagagtttaattttgtgttttatacatctttgcttaagagcttaacaattgaaactattaataacttttcaggatggttaagtttttagtgttaaacatcttaatttcaggagtgattttaagagtatttagattcttgtattcaagtttcaggagtgatcttgaatcaagaaatatccccttgttcaactattataattgatcttattcgagttcttggagttaatttcttcaagattcatattcatacttgattattagacttcttggtttagtaatcatatcaatatcattagcattaatttacccccagggagattaagaaaggattagcctaatcaaggcgcttaagaagtttttaggaaaaatcgtgcttgttaagcttaagaattgaacttctttcaccatttgcccttgattctcttgttgaactagaagatcttggttcatagtagatgctcctgcatcatagtagagcatttaattttaattttttaacatgcacgaagatgtaggtagtgtagtatatatcgtgagacgtggtttaacatatagaaagatgtagtttctgcatgatatagtgagtttttgcatgatatagtgaatgtctgaatgatacagtggatcgttccgaattgttgtagtttgtatgatatagtatttttgtgaatgatatagtgagtttcttcatgatacaatgggtttctgaatgatatagtggattgcttagaaatgatatagtgagcttttgtatcatgtagtaggtttctatgtgatataggttgttaaaagatgatacatgcttttggcctcatgtactctaatgttaacgtgaacccggtccttgcaagtcaattgcagttttttcaatattaagctatttttttttttttttttttttttttttttttttttttgtacgggaatatttagcatctttaccacaaacataaccatacgaatattatgcggaaattccagtctgaagtcttaacttttcaaaattaaaagcttctatattatttttggaatgaaaaaaaatgagctatggcatgttattttgaaatacaatgagtctcaaggtgcatagtggcttcaattctacgaataatgaatggactactgatttctaattttttgttccgggcttttgcattaggtaaccataaagatggactctctgtgggaagaactatttcctctggatacaaagctgcggagcttgtgatatcctatctcaactctacttaagatgcctaaatgatcgaggagactccgtaagtcctttctctgattctatctttgaactgagtggaaacacgactgtggtctaaagtagttgatgtctcagatatccagaaatggcgttagtgatattcaggagctgtccattgaccctttgattcattgttgcagtttactgaaagttgttagctggtctcagaaaaacgaaaggaaaaaagggggaaaacaaaaacaaagaaacgtagattgtggtgttaaaatcaagaattccagagatttgtaccttctttatcagttgaattgtttacagtgtgaatcaagaagttagctcgaccttcttttcttgtgaatggtaagatttcgtgatcatcaatacttgattgtgctgtttgcaacttcaacggtaagatttcctgatcttacagtttaattgcttgtgctgtttgccactt

SEQ ID NO: 101 - DNA, 1575 bp, synthetic construct
  source 1..1575: mol_type = other DNA
atggtaatgctatacgattctcacctctcaggagtctcaactcatcttcaactatcgcaggcatttcccaggaagaacccattaatggccaaagtgtctgagccgggtaaacccacttctgctaaaaggattgctgttgttggtgctggtgttagtggacttgctgccgcatataagctaaagtcccatggcttgagtgtgacattgtttgaagctgatactagagctggaggaaaactcaaaactgttgcaaaggatggtttgatttgggatgagggggcaaatactatgatagagagtgaagcggaggtcacgagtttactcgatgatcttgggcttcgtgagaagcagcagtttccaattgcacaaaacaaaagatacattgcgagagacggtcgtcctgtgctgataccttcgagtcccattgcacttctcaagagcaatatcctttcagcgcaatctaagctacaacttatgttggagccattcctttggagaaaacgctatgcttctaagatttctgatgagcatgctcaggaaagtgtgggtgagttttttgagcgacattttgggaaagagtttgttgattatctaattgatccttttgtcgcgggtacaagtggaggagatcctcagtctctttctatgcgtcatgcatttccagaagtatggaatattgagaacaagtttggctcactaatttccggattaattcaatctaaactgtctccaaagaaggaaaagggtggaggaggaaagccttcttctaatgaaaagacacgcatacgtggttcgttttctttccagggtggaatgcagacacttgttgacacaatatgcaatcagtttggtaaagatgaactcaaactacagtgcaaggtcctttcattgtcctacagtcataaggggatcccttcttcagaaaattgggtcgtgtcttctgtgtcaaaaaattccattgaagatcaacaatatgatgctgtcatcgttaccgctccaatcagcaatattaaagaactgaagattctgaaagctggagttccattttcacttgacttcattccagaggtgagttacctgcccctctctgttatgattactgcgtttaagaagaccagcgttacaagacctcttgagggcttcggagttcttatcccttcgaatgagcaacataatggactgaagactgagggtactctgttttcatctatgatgtttccagatcgtgctttctccgatatgtatctctatactaccgttgtcggcggaagcagaaatagagaacttgcaaaagcttcaacggatgaattggagcaaatagtttcgtctgatctccaccagctgttgggcactgagggaaaacctacttttgtgaatcatttttactggaacaatgcattccctttatatgggcacaattacgactcagttctgagagcaatagaaaagatggaaagagatcttcctggacttttttacgcaggtaaccataaagatggactctctgtgggaagaactatttcctctggatacaaagctgcggagcttgtgatatcctatctcaactctacttaa

SEQ ID NO: 102 - DNA, 37009 bp, synthetic construct
  source 1..37009: mol_type = other DNA
tattccatcgaatgtagcaaattgactgtccgttgcaatttcggagtttccactcgtcgcatggtaaatggtaatgctatacgattctcacctctcaggagtctcaactcatcttcaactatcgcaggcatttcccaggaagaacccattaatggccaaagtgtctgagccgggtaaacccagtaagtcaaacattcgaatcacaactcaagcaaatttgtcttgtttgcgttatattttgctcatttcagccttttttgtttttccgacctttgcatactgaatattgtgtgtgtgtgtgtgtggggtttcagcttctgctaaaaggattgctgttgttggtgctggtgttaggtaaattttcgtctcttgcagagtttttgagtcatttgggaattctatgtgaaacttgtaactcccttcagtccaacgaacgcagtacaattttctatcaaatcatggtcctaatttccaattttccatatatattgttggaattatattgggattgtctatcactattaatagtattaggatcaattgtagagaagcacagaaatttttgggatcgaaagaatatctggattgccacattaacagcagatataattcttccaattggtttttggttcttcctaccttgacttgtctggtcaaacattataaactttaacctttaatatccattaaagtaaactataggatttttttgtctaaaacatgcttatataacatgaaatttgtgagaaaccaccttatatatatttttttgcgaaaacaaaccttaaacaaaattattatcgtgagaacaaaccttatgccaatttcgatcattgacccaaggttttggcattgaccgtgtcatgaattttgttgggtttaaaaagtcatgtgtcttgcatacgaaatggtaaatgcgggaaccttgggtcaatgtttggaatccgcataaggtttgttctcccaaaaaatgtttttgttcaaggtttgtttttgcaaaaaaacttatataaggtgctttctcagaaatttcatgttttataaagtagtatttgacaaaaaaccctaaaatatattatagaattattattgactaaattgtgtaaaaatgtactcttctaaaagtacattatagtattttagtggaacatttgcgagaaactactttataaatacgatttttgcgagaaatttcctaataaaaaaatgtgaagtgcaaaactatcttattgataattttctactccctcaaatccaaaatactatgaagtctttcctttctggtttgtcccagattagtttgtacgcttccatctttggtatgatcccacttttattatacttattagttttacgtgagttccttactctatctcttttaacaaaaatactcaactatctctatccaataaaaagttccttactagtcctatcacatctgctttttaataaaataacgtttgataaccacacaacttatatccttaaaatacacgttcaaccaagtgttgagattaatttggacggagggaataaatattttttgaggcatattggtagcagtattcggattccgataggttgactatgtttccaatgttgaccaacacttgccttgcatgtaattctaactttgctcttttttattcttcatttccctcgtattccatatacaatgtttagagacccattccttcctcttctcttctttcccttccttactatgctttgccataatcttcctcaaatgagtgcaaattaatttgtcgttgatgtaggccaactgattgtagcacatcttcatagttcatacctcaacacactcgtaattatattataccctacatgttaaatggctcatgaagctttattttatatcatacttcctccgtttcacaataagtgtaacacttttcttatttggaataatcacaataagtgaaaccaagctccaaatggtaagaaaagttcactcttattacaaatataccaccaaaaagtaagaggggatcacaacttcaatacttcttcactctactttattgtggtcccaactttctctctctaaattccttggtaactccccactttctctatgtttcacttatggtgaaatggaggaagtattttgtagtggtatttagctactaggccttggatgatatacaatcatacaatgtatttatattcacgataatttgctgcccaccttgattaccatgatttccaccaattttatcaatttcagtacttcaccaccccgaatttatattttttatttccaaccttggtatctccatttgtctgagtgcccgatccatttgtatcgcctccagaattgaagaagcttcctgcagctagacaattaggaaggttaaaaaagtttggagatggtggaggatagccataataatcattgttgggaggtggaacttggaaggttattgtagggttgaagtccttgatgaagaagaattgagttcaaatgagaggaaaaaggagcagggaagagggacaataagaaaaaaaagggtaaactaaaatcacgtgtaaggcatgtgcagatcaacatcagaaagcatagtcaacctactggtattagggcactgatacctttttgggtcaaaatttttttacaaggtatttcatgaggtagttttgtccatttttttttttacaaggtatcgtctcattttttttttatcatttagtttctcgcaataagtgtatttcatgaggtagttttttccaaaatttcctcatttattataaaatacctcatcttttccataaataatgcaatgtctagacttttacgctgtttacacatgctcctttgaccatctattgacacacaaggaaaaatagagtagagtcatgcaggatcttgttagatttttctcgatatatactttcaaaagatcaatttttttataattttttttttgaggggattttttttttataattatgtacttatcaaaggtcaaagttgtgcaccgggaagcataaaactctatgtgttgcaatttacatggaaggggaggagtataataagagaaaattatggtaaaaggttcattcctggagatcatgagaaaggaagtagaaagaacaaaaaagaacaatgggagtgcttttcaatgtttgttgtacgtagcatttattcatttgctataatgttttgtgacattgtagtggacttgctgccgcatataagctaaagtcccatggcttgagtgtgacattgtttgaagctgatactagagctggaggaaaactcaaaactgttgcaaaggatggtttgatttgggatgagggggcaaatactatggtaatgtttttgattattgcaggtcttgcactttagcgcacaattaatttctggatttttttttgtactgtggtggttatggtcatcaacatgtctcacccactgtgcttgcagatagagagtgaagcggaggtcacgagtttactcgatgatcttgggcttcgtgagaagcagcagtttgtaagtctttcattatctgaatggcacatactttatttcgaaagattgtaattgccttttctttctagatggcttcatcttcatgttgctttctgattcagtttcgtggctaactttccaagtttgtctgattgctaactctgtcatagccaatcgcgcagaacaaattatacattgcgagagacggtcgtcctgtgctggtaagtttgcttgttttacttttgacctcttttaagatctttcaactctggagcctggaaacatggtgatgcaggaggcaagttctctctattttacatcctttcttctctgtatcttatgacatttgcctcttattctgtgcagataccttcgagtcccattgcacttctcaagagcaatatcctttcagcgcaatctaaggtcgttttatgttaagacatacttgatgctgagagtttattgaattcttaaccttcttcttattttttttttatttttttagcaaaaggtaagtatattgcatttaccaaaaaacagtatgtacaccaccacagcagccatgtcagaatctagaaataccaccgaaaaaatcctacacccaaccagagacagttatattatatcctactcctaagtttctgtacccaatttacatcaatattggtccatttacaagatatttttataattcacagaagcacatcagttttaattagtttaataatgacctctggatgaataaccaactcagaccatatagccttattcctggctttccggaagttgtacgccagagcagcaagcacagcaatgcaaacctgtttcttatacctccttttatgtgtcttagcccatctcttatagctagtgaagatacagtcgtgtgcacaggattgaaccccaatccaactagcgaaagcctcacaacattatgactataaatacatctgaagtataaatgctgcacctttttctcctcttgcctgcacggtatcagaacaaatcccagctttagctaacaattccctggttttcagtttattcaatgccatcatgcaagcaatgaaagaatgttttggaacattcagtttgttccaaacacagtgagagcaagggacctttcctgcagttccacttagccacttatatccctgactaatagtatgactctttgcaccgtaaattgatttcaacttaactttttcataagcagtgaattgtgtgttgttagagtgtctagctgtctaggagattgggagaaaaggagggaccaaggagatagaaacacacctttgtgtttctttgtgtatttactttttagggtgggtcacgttttctgagaaatttgggaaaaggaagaaatagtaacacactttcccatttgtataacctgtatactggagctccaatataatttgcatttttttttgagctgcaagaatatgttgacaaacagttattgcttcttcctcagctacaacttatgttggagccattcctttggagaaaacgctatgcttctaagatttctgatgagcatgctcaggaaaggtaatgtcaagacatgtgttacctcgccttaattttcgttccaggaggtgagcatgcatttagaactaaaaggcacaaagactgttggtggtcttgcctgttcaaatataatggagaggagttttcgctacatttaccctctcttgaagtggggttgaaatatagcatcaagttgaatgcttgattaagtttaaaggacttgtgtaactctttttctgtttactgtgattacatgacctggttgattaacataatggtctgtttatctgtagtgtgggtgagttttttgagcgacattttgggaaagaggtaatggtttaccatagtatttctgctttagtggtaaattgtaatgttgctgataattatacttcgctgcagtttgttgattatctaattgatccttttgtcgcgggtacaagtggaggagatcctcagtctctttctgtaagtgaacattttgtgcttcactcccaattttttggaggctggaaatagattcttttccagttgttctgtcaaaaatagatgtagctttattttgaatttgaagttcccaattgttcattttgactattactgattattgctaagagtggcattatgctattatgctcctaaaagaaaggtgaattttgacctacatatagtataatgtatcaatattggtttaattgtttgttcttttgttccttttggtgctcatcttgcgccttgttctcatcgctcgttttttcatgttgcacttgatttaaatttgctcagcttaacttgtctttttgaatttatattacttattgctatattttactaatttcgttgaaactaattttttgctgaacttttcgttttgttgaaatcatttttctgaattaacttgattttcctgaatagaattgaattttggtgatcttaccttttctgcagccttttatttctttcttgtcctttttccaatctcatttttttatatttccattgtgttgacatcttatcattaactgtgcagatgcgtcatgcatttccagaagtatggaatattgagaacaagtatggaccataagacgtttattttaatcgacatgtatgtttcttagtttatacatatattaattctgtggtaaaaaaaccgaacaagaatatctttttttttttctatcatcaaaaagggtgaatatatgtagaggaaaaagatttgaatcaagatattagcctaaagcaataataatgttagtaatagctttaataacaaattcaaaacgtacattaatgaaccgagaggccggaaaatagttaaagtgaccactaagagaagcgaaggattcatgatgggttttcaacccagtagggcaaatttgttcaatgttctttacaaatcaagcttattaccttgtgggtgtttttgctagagatgaatgatagaattttccctagttggaagtcttttttggttactttatgggagctagtgatgtaatttgtttcgccttatggcatttcctaacatgtgcttttgtgatgtattgaagctttttttttgccttaatttatgctggattttaattttgttctttgtttcatttttcttgcttttgaaaaaaatatatagatatgtatatattaggattggtcgaggattttgagggaagggaaagacctaagaaaacttggatgagggtgattgatagtgatatgagtctatttgggatcgaagaaaatattcctttggataaggtgtagtggagggttgagggagcaaatttatgcagattagcttgacttaaagtttttctttttgattatttttcatttacttgtgttttgcaaacatttactcatgaatgatgtaaacttcttcaaccaaatctctggaaaaaaataatctacatggaaaaaacattattaatgttaacttgacagagatcccatccttgtgaagcagctagcaattaggcatctaacaattgacattttaatggacaggatagaatgtctcttgatagtcaataccctctgtttcattgtatcccatagctactaatctagtttgtatctttccaaagaaccattattttgaagtttcaccttgaacacccattttgaaccaatatgtttcttgcccttggggagaggggctaattgccatgttttgatgcggatgcaaagacacttgttctacctgagcctattgacttgatcatggatactctagggtttgaactcaagggaaagaatcaagtcttggcatgtgtggtgacatggcgtggggatggagtaaagaagagtcatagttctgttaggatatgttcttgcttgctacatagaatcgtagttctgttaggattgctatgatattatatctagtagatagattttatagttaattaggataaacatgtgatgatcatgttataataggcatgtgattagaggataggattagcttaattcttatcttgttgttagtttaattcttatcctagttttatgtttatcttagtcgaagttgtagccatataaagggcgttccattcattaataatacttagttttgctttgtgttttaaacatacttcttgattattgtttgcttgtgagctaactaatcaaaccattaaagacttttcaggagttttagtgctaaacatcttaatttcaggagtgattttaagagcgtttagtgatcttgaatcaagaaatatccttgttcttgttcgactaatatcagtggttttgttcgagttcttggagttaatctcttcaagattcttattcaacttgattgttgagcttattggtttagtaatcatatcaagtggtatcagttttccagggaggagaggatagataggattctctttgatcaacaaagatccaagggctatcaacaaggttcaaacattgctgcttgttcaagacttgatctttttctaccaagatgcattctttacgtcacaaggtagtaataacaagattaagagtggtttttacatccaagaatcaatctttcacgtccaagatttcatctttcacgtctaagattcattctttaagatcaagaaagttataacaagcatagaagaacacataaccatggagtccgagatggacaagcttgccaaagctatgcaagcacttgcaaagtcgcaaactgaatcacagagtcgactcaatgagaatactaccacaatcaatgggattggtagtaacatgaataggttggaggcacgcatggatgccattgcaaccatcatacaaaagaagcttgatcggaatagtgccaacttcataggtgccaattcagaggaagagttggcagaacgtgaagaaagatcatccaagactacatacaatgatgatcgtggcttaaagttggatgactataatggagatagcaatcgagaagacttgttacagtggattcgacaacttgagaaggtatgtgattatagaggctttgatgacaagaaaagattcaggattgcctccataagactcacgaaatatgctggaatttggcttgaaagcttcaaggcacaacgagccaagaaaggtaaagaaaagttgtgtagttggacaaagttgaaagttcaagcttaaagagaagttcttgcctagtgactatgaacaaaaatagttcataagactctctactataagccaagacacgcttagtgtacatgagtacaccatggaatttgacaagctagggcttatatttgacatagaggagaaagaacaatggaagattgcaagatacatcaaaggcttgaaccgccacattgccaagaaggtggaagtatccacttatcacacctttgaggatgtgacaaagttggctaagaagtttgaagaacatgagaaggaagagaagcctaagagttcttacacgcctaagtatgatactaatgctaaggccaaggctagcttcctactcaaagtggtatgaaggacctaagaggctaagaacctcaccccacctaaagaagacacaagagttgagaagcctaaagtcgtcgttccaaaggagaaatttgaagagatgagaaagtgcttcaagtgtcaaggaaggagacacatagcaagcaattgtcctaacaaaagagtcctcaccatgagacaatacctagctttgcaagaagaggaggatgtctattagttcgtccctgatgaagagcaaacttaggggaagaagaggaggaggatgcttttgctgaggatgatgcaaggctagtaggggtcaagaggcgcaccttacatgtcgaccatacacctagcatggagcaaatggaaaaatcttttccacactagatgcaaggtaggtgactatatatgtaatggtataatagatagtggttcttgcactaatgttattgtatctgaggtagtgtcaaagctaaacttagctacaagggcacaccctaagccatacaagttgagtttgctagatgatagcactggcatgagagtaaagaaacaagctttgatttcattctctataggggttataaggatgagttatggggtgatgtattgcctatgagtgcatgtcatctcttgcttggaagaccattgcagtttgataaaaaggtcatccatgagggggactctaatgtgtactctgtgttggttggttctaagagggtatgtttgcatcccttagctcctcattcagtggcgccaaagcaaccacctaagacaccaagttactttctatcttcaagggagttcgaacaagaggtggaggaagaaggttgtgcttatgccttgattgtaagacatgctgccacaagtgtcaagactactagcaatgagaagctcgaagccttgatgaaagagtttgaggatgtctttctagaggaactacgacccttgagaggcatagaacatgctgtagaccttgtacctggcgcccctttgcctaacaagcctgcttataagtgtgatccagtggcatctagggaattgcaacgccaaattgaggacctaattgaaaagggctatttaagggagatcatgagtccatgtgttgtgccagctttactagttcctaagaaagatgacacatggaggatgtgcatagatagtagagcagtgaacaacattacagtcaagtaaaggtttcctatgcctagattggaagatatgttggataagttacatggggcatcaatcttttctaagattgatcttcgaagtggctaccaccaaatgaggatcagagaaggtgatgagtggaaaacaacattcaagaccaagcagggattgtatgagtggatggtgatgccatttgccttatgcaatgcgccaagctctttcatgagcttgatgaatgaggtacttcgtccgttccttaacaagtttgtggttgtttacatagatgatatacatatctatagccaaaatgtggaggaacacttgttgaacttgcgtagcttattcatgaagcttagagagcaccaactctatggtaagattgatggcgacgaggttgacgggggattatggcggcagtgaatcaccctctttgccggtcactgaaatacaacctgaggtatctttaaattctgtaattggattgactaacccaaaaactatgaaattgctgggaaaaattgctggatgtgaagttgtggtgatgattgaccctggggcaacccataattttttatcactagctactgttgagaaattagctattcctgtgtcggaatcggaaggatttggggtttctctaggggatggacaggcggtgaggggtagtggaatttgtagaggggtgttattgagtttaaatggtggagttgaagtggaaacagattttcagcctctgggtcttggtaattcggacgtgattttgggtgtacagtggctggagacgttggggacagtggagagcaattggaaaacacaaacaatggggtttgaaatcgagggtgtcaagttcactttgaaggtgacccatcactggcgaggtctcgaatctcactcaaagccatgatacgtaccttatgtaaagagggtggaggtttgtggcttgagttgaaccagattgagcattatcaggagaaaacaccgcattcatcagccttacctgaaattccagttttcttacagagagtccttacccaatttcagtctgtgtttgctacaccagaaggcttaccaccgataagagaacatgaacatgcaatagttcttagagaagggtgtaatccggtaggggtaataccgtaccgttatccacagttccaaaaagatgagatagagcgcctcatcaaagaaatgttggcttccggaatcatcaatccttccacgagccctttctcgagcccggtgatattagtgaagaagaaagatgggtcgtggcggttttgtgtagactatcgggccctcaataaagaaacggtccccgataagtatcccattcccgtgattgatgaattgttggatgagcttcatggggcaacacttttttcaaaactcgacttaagggccgggtatcaccagatccgggttaaggccgaagacactctcaaaacagcttttcgcactcatgaggggcattacgagtttttagtaatgccatttgggttgacaaacgcgccggcaacgtttcaatcccttatgaacgaggtcttcaaaccattcttgcgcaagtttgtcttggtatttttcgacgatatattggtctacagtagttctgccaggaacatgaggagcatttgaccttggtgttgcacaccctagcagctcataaattgtttgtgaatcagaagaaatgtgattttggcaggtcggaagtagcatatatggggcatatcatctctggtcaaggggtggctgtggatatggagaaggttcaagcgatggtggaatggccccttcctaaaaacctccgggaattacggggatttttgggccttacagggtactaccgcaaattcgtacttcactatgctcatatagccaagcctttaactgatcaactcaagagagatgcgtttgggtggtctgaggcagcaactcaagcctttgaaaagctcaagaaggcgatgatcacatcccctgttttggcaatgccggacttccaagagttgtttgtggttgagaccgacgcatccgggtatggtctgggggcagtgttaatgcaaaacaaccgacccattgccttttacagtaagttgttaggtgcccgggctcaattaaagtcgatctacgaaatggagttgatggccatctgcatggcagttcagaattggagatattatctgctgggtcgacatttcctcattcgtacagaccaacagagtttacgtcatctcactcagcagcgagaagtaagtactgccttccaacgttggatgagtaaacttatggggttcgattttgaaatacagtttaagccggggtgtgccaaccgggtagctgatgcattatcccgcaagacagtgggagaggttgaattgggtgcgctgatattaactcatggggtggactggaccgacttggagcgtgaaattgaaggcgatcctctgttgtgcaaaattaaacaagacttccacgggggtgctattactcctgtgcacttttctttggtggacaacaagctgttgttcaagggtcgatacgtgattcccagctcttcggtttttattcctaccttgctgcgagaatatcacgattctcccattggagggcattcgggggacctcaaaacatatctcaggatggctgccgactggtattggaggggcatgcgcaaggatgtggcgcggtatgtgcaacattgtagcgtgtgtcaacaacaaaaaatgtctcaacagatgccagggggggtactacaaccactccccataccttcctcggtttgggatgacttgtcaatggacttcgtggaaggcttgccatcttccaagggggtaaacaccatcctcgtggtggtcgatcgtttgtctaagtacgcccacttcctcccactacgtcatccatttactgctgtgtcggtggcaaatgtgtttgtcaaagaggtggttcgtttgcatgggtttccttcctccattgtttcagatcgggatcgaatttttatgagtgtgttttggcgggaattatttcgtttacatgacaccacactcaaacgaagtaccgcgtatcatcctcaaacggatggtcagtccgaaatcgtcaatcgagctctggagacttatttgcgttgctttgtgggggaatacccgcgctcttgggctcagtggcttgggccgaattttcatataatacttctcctcatctctctaccaaaatgaccccgtcaaggtcctttatggtagagaccctcctactgtgatacgggttaatcggggagcctcacctgttgaaagcttggaaaacatgctccaagagcgagacgcagtattagatgccttgcagattaatctgattaaagctcaacagaaaatgaagagtagtgctgatgctacaagaagagaggtgcattttaaggtgggagatcgagtgtacttaaaattacagccttaccgtcagaaatctttggcttaacgcccttatgagaagttagccgcccgtttctacggaccatttactattttacagaagattgggcaagctgcatacaagttacaacttcctgtttctagcaaggtgcatccggtgtttcatgtctcccaactgaaacaggccgttggttccattcccgtttcagccactattccagagcaattgtcttctgacttggagttagaggtggaacctgatgaactcctcgatgttcgtagtgtttctagaggccagcacacttacttggaagctctcattcagtggcagggattaccatcattcgaagctacctgggaagatgtggctgctttccatcaccattttccatccttccaccttgaggacaaggtgaaactttgggggggtggtaatgtgatgcaccaaactaccactccactactcacctattagaggcgtaagaaaaagggggtaaatcaggaatagtttacaaattctgttgaaaggaatattttgtaattatgatgtcagaggttgttagcaaaaaggcagtagagtaacaataaaaaggggaagggaggagagaagaaggtattgagatttttgtaaggaacttggcccttgggagagttgggagcctctcgaaagctcaccattatcttgtgaatattttccttcctggttatatacaagaaccttcctctgtcaatttcttttctctctaatcttatttcttattctgttttctggttgccattgtttgaagttgcttgttgtgcttgagtaaatacgtgaagtggtgaaacccatctgaattcatcacatctattccaagtggtataatacaagcttgtaatccaaatctaatgagaaatctaagttatgaagaatttcaaaagaactaagtacccttgttttggatgcccaaggatttacttgccgctcaagttaatgctcaacgtgcaagatacaacctctttagtatcccaaggtagtttccataagaattaattgagctcaaatcaagaacaatatttttatgtattaatgtgaacacttcctgaattatattagatatatggtctgaaggttggaagaaagattagcttttaattttaagtttgagatagtttttagaatcgaggaaagattagctcttaacttgtaaactaaggattgctttataagtaaaacattagttatggaactcttaaaattggttttgaacatttctagttaaaaatcccatgtaattctcccaaactagcttaaaatctcacatttcacaagctaaggagagacaaatggcgttctcttgtgaaacaatctaaaattttcattaggctactgttttcaagtatttatatgttagaagtgccgcatataggtacataaaataagtttacaaacacaagtaggaataaggaaaactaaaagagaaacttcagccatacaaaaccggctgaaatcagctactactttctactttctagcttcaaaatctgattgcaagtctcctttaagccaatcaccaatgaaaacctttcctccacatgaagtgtgctcaaatcaagagaagaaacccatcattcgcctatagctacctgggtcagatgaagatacggcaaaaaaaacgctggaaatcagtgaaccaaaataagcaccaattggatgctttctgtccttgctacattttcttctcataggactacttcaagccatacatgaataagcagttagatccagctcctagcatccatttgatcgtacaaatgagctccaaaaagataagtaaaaccaagcagccaaaacctaattaatactaatgatgaattagttgaatagctaatgacgatgaagcaacactttagtaggaatagtgttaattatgatcaatgctacttaatcttctgattaatttttggaaaaatgtcatatctaccttctgtatacacttattcataactatatcgtattattattatttttaaataactaccttttaagtaccaaaacctaagaaatcaggcacttgatggattccatccaaagatccatttggcggggcccactaactgacttttgattttttgcctttcctcttttggttaatctcaatggttcatcaataacaactcaatcttctccccatttcatcaaatcatccctaaatcagaactttttcaaattcacccaaatgaggttatggaaacctctaccaagtttattcgaccacttttagtctagctcaaagttttacacttgcttcaaaaactaagatttattaactttagaaattaggtttttatttttattttttatttaactttgtaacaatcttaaataactcaggtgctttctagagtttggctttaattgtttttcccttggttatgtgaaagaagtatgactactttctccaagactaaagtagagagcaaaaaatgcaattctggaatttcttgcaaaagaaaaggaacgagttaatgataatgaaaaacaaagaaaatgatgagaagagaggagctgaatcaatcatgatcatgtattttaaagttttttttgctattgaagtgacttaagaagaggaaagaggatgagtgaagacaaacaaaagaaaggataaatagagggaaatcttgggcttagaaaggtgaaaaggtaagaagatgagttagtgggccccaacaaatgtatctttggatataatccgtcatgccactgtttggggcttgcttaagtccatacattacttcactaattttacaaaatttattttcttgaccaagaactgaaaaaaccttcagtggtgatctattaggttttggaagttaaaaggtagttatttaaatgtttttaatataaaaggtagttatttagatatttttaatataaaaggtagttatgtgaataaaagtgtatataaaatgtaattttttgacatttttgccttagtttttcttgctaattcaccttttcaacttgaccaagttgctatgaggagaaaacgagcaattattaagcaaatcgcaacactagcattaatccatggcccatgaaactctccataattagagattggattagcacttagtagaacttcttgctcctgctccaggtttccattacttctttatctaagtgcatcaaaaggttgttgggttatgaaaggtggtggttgtgtatagtcattgtcaaaatgttgttaatgcactctatttagaggatgagggattgaatagttttcacctcgtgacctttcattcctttttaaaaaaattgataatgtgtattggtcctatgactgtatgaatggtaataagctatctcatgagctgttactatcttcctcagagtctaggtagaagggtttgggctgataattttctactatgtgcaattagtttgttggatttggatatgctagttgatataggtcctttcccttgggccttctcttaatataggcctacagtgtgattgaagataaatcttctggagaatataagaacaatgagatggattggttagaggttgatttgttcttttggtgtaagactatttcgggttctctattggttatgttcagacgccagaatatgtgttggtgattgttttccatgaacatactttatccgcagagacatttttcttttttcttcctataagattatatttgtttcctctcttggtgctcatctcagtgtctctactttacgttaaactgttgacattacttgacaatgcgtatatttgtcgcatggtgctcttccctcactccacgtcgaccccatacatcaaaaaatgccattaaagaatattcgaactcacaaccttgtgttgaaagaatggaatccctaccaatgactcattaattcattttctctttaagaaataaatgatttcctcacaaacttttaggctttaagagcccaaaagataaaaacataaaataagatagacatcaacgtcaagattagccttaaatgcacaaagcacatgtcaaatgattgataactactcacgagttgcaactctttgggcgttgcctaatattaattggatctcttttaaaaattgttggtggttatggttggtggagaggaccatgtaacttttagctggtcacaactggtaatgattgtcacttttactgcccataaaaaaatttaaactgttgaatatgtttctggcagtggatctgacaaatcctttacaagttggcgtccattttgttttgccatgtgactcaattataatacgtgagttttattatccaccaggtttggctcactaatttccggattaattcaatctaaactgtctccaaagaaggaaaagggtggaggaggaaagccttcttctaatgaaaagacacgcatacgtggttcgttttctttccagggtggaatgcaggtattagcatgtagctttcattctgttaacatttgtggttcttccagacatacatccaatgctttttttttttcttgctataaccataaacattcttgtcatgaacattctttaatactgttgctgagcttagtgtattcgttcattcatgtaatttcctctcttgaggttaaaatggcatacagccttacaacctatatccataatgctccttagagtagaatccctaggttataacatagtaccacttatcaaaataaacatggcacacactgcaggacaagaagtaaatccacctagagaactgagcacctagtagtaaaagcagcgatacattactaataacagtagcagggccataagagtagtaaatgggcctcatttcaacactccccccgtaatggtgagagagaagaagcagtctgaactcccagcttggagagcaaaatagagtgttgctgaacagggagaaccttagtgaaaacatctggcacttgatcttgagatggaacataggtaggctgaataaccccttcttcatttgtattgtccctcaggaaatgacaatctatgtctacatgcttggttttctcatgatgaactagatatgctgctatggcaagagcagcttggttatcacagtagataggagtagcactggactttttaatgcgaagatctttgaggagttgtttgatccacatcacctcacacacagcaagagccatggatctgtactctgcactgaccacaagaaattgcctctttgactttcaagatacggggggagtcaccaaggagcacacaaaaccagatgtagaatttacaacacccatcccattcactatcacaaaatgctgttagttgagcactagacttgttcgccatgagaattcaccctgttggcagcttgaagatgcacattagtggggcagtgcataaatttgcttaaatcatgtatagtgaaggcaatatcaggcattgccttgtaatagtgagataaatgagcttccccatcaatttttgatacacatcaggttgttgaagaggatcaccattgtcagcatagagcttgacatgtgagtccatacgaagcctcaatcgtctgcaatttataaaaccatattcatcaacaagacccatcacatacttctttagagataaaaacgatacttcactacactgatccacttcaatcctcaaaaaatatcttaggccacccatatctttcatgtgaaattggccagcgaagaaactctttgcttcctcaatagttgctaaactattgccagcaagaatgaggtcgtccacatacaccaatatagcactgaaacagtgagagttttgcttgaagaatagagagtagtcacacttggattaagtgaatacattttgctttaaagcagtgttagcttggcaaaccattgcctcaaagcctacttcaagccataaagtgacttaagcagcttgcacaccttagttcatttggtgtcacttctgccatcagtacttagctccccctctccttgaactttgatcctgttacatgtttcactatatcctggtgatagcttcatgtatacactatcctacaattcaccatgcaaaaaagcatttttaacatccatttgtttgcaagaaccaaccctctaaggatgcaacaacaagcatgtggtcatctttgctacaggggtaaaagtctgctcataatctattccatatctctgtctgtcacccatgattacaagccttggcttatgcctattatttgtgccatcagtgctgtattttgttctgatccatccatgtgagggatggctcatttctacaaaatcctagttccgttaggatttgtgttgttttcctaattctagtaggaataggactcctaaaatcctaatcctcctagttctgttaggagtttaaaagttttagtttgattgtaattctagttgtgttagaaatccaaatcctagattcatgtcacgtatggttagaacatggctagtaggataatttgtcttgtgatgtccatagccttggcatttgtggcacctaactttcaatagcttgtcttctgtctccttttctttctccttctttgaggaatcaacgtttttagagctatctaaaccactagcatcaatattaggtttaaaagtgctaaaagatttcgaatagttcttacttgcatacaatttctttttctagtttatgtagcgtcaccagggaacaaaaactcggccgttccgttctggaacggccgctttgtaacggatttcagagaggccgttccgttaaataccgttctagaacggtgatttggaattcacaccaaactcggcgcgatagcgttacgtaacggtgtaacggcgttccagaaccgttacaatcacataacgtccgttatttgaagaagaccagttcttttggtggaggaagaagaagagccaacgcaagatctatagatctgagttaaaatttgaaaataaaacatgtttttttatttaaattaaagcttacagaggatgtagaactcaaattcgagtaaacccctcctttaatttcattaggttactgcaaatcgaaccctaaattgcaaaccctaatttcgaaaaaaccctaatatgcattgggatgcaacgctgcttctccggtcatggcagagaaggtcgacgagtcatcttcggctgcttttagcactgtagctgccggtggttggcttgtttgcaggttagtgcttgctggttttctttctctcataccgatcatcttcttcttttctctcttctctttttcttttttattgtgtgactgccagtcacgtgataattgcaactcataaagtatctctttctctctcttcttttcatccctttttatttttctttcccttttagtttttattccctcacgtggaatcacctaattttcatccttttttatttttttagttacactcttacacagaagtatgttcaaatatcattatagtacctcaaatattgtatttataagagttttggacataatatgatatagaaagtaaaatagaagaaaaataaagtttaaatgtcacttgtgtgatttttttaaaaaaattcacgccgcgacggccgcgaaacgttctatttcccgttacaagccgttcccgcgataacgcgaccgttcccgcgaacgcgaccgcgaccgcgttttttttccttgagcgtcacatcttgcaagcttcttcaaaggtgagttatgtgtacaactccaatttctctccaatcccctccgtcctcatttaggcctccaaggaagctacttaaacattgatcttcaagttcatcaattttccaaagaatggataacttctcgaactcctttatgtaatcttcaacggacatattcccttgtttaagagtagaccattccatgtacaagctttgtttgtagttagaaggaacaaaacgtcctcttaacaactttttaagcttatcccaagtagagattttgggtttattagctttcacacgctgcctctttactccatccaaccaaatagatgcatatttggttaccttaagcacggccaccttgtatttcttttcttttggtgtctcttaatcccaagtagagcttttgcgtgtgaaagctaataaacacaaaatctctacttgggataatcttcttcttgtttccgaaacaactaattcttatggtagttaggaaagcaagaatggtttctaattcaatagggaatatattaattattattagtttaagttaaatagtgcacgaatctaaatagattattcgtctcaaaatctcacttaagtatagatttgtttggacatctgagggaagaagaagagagcgagataaaggagaattatcactcaatgaatccatatcccgagttttcccatttacttctttgaaagcaatatagttcacgaggtcttattatcagtctatggacataagagtaataatttaagggcaaaaactatgactttatgggtttaaactgatacatgttctgttaaactgatagatgttctgtgttaaaccgatactcatatattcctggttaaactgatagatatatgatttaaattgatacccgtctcagtcatgtcttggattgagacggtctgacacaagactttttgtgtattatatatctgattagaataaatttatcctgtttactaattattttatcttctccagacacttgttgacacaatatgcaatcagtttggtaaagatgaactcaaactacagtgcaaggtcctttcattgtcctacagtcataaggggatcccttcttcagaaaattgggtcgtgtcttctgtgtcaaaaaattccattgaagatcaacaatatgatgctgtcatcgttaccgtgagttttactttgcttactgctattgcaccaatctttcttcttttgacacactgataatggcaatgctgttgtggtttgaagccatgttatggggttttagggatatttatggagtctgatctaatatgttattggataaaattcagatctgtaacgtgactcaatgagattgaaaaaaattgaatcaagataatggattggaaaattaggagctaacctagggtctataagcgatccacttggagtctcataccaagcaggtattcgacattttaggtttatattgctgctatggctcatatgggagcctacatagggtctggtgcttattcctttttcttttgtctagttttggggctgcacatttctgttgtgttttgatatggatagccatcacctgcaattgcatggaggctgaactaagttctataggggagcaaacagtatctgttggaaatttattttcatattgtgtttttaaatgctataatccaaaatttgttgttcccctaaaatgcctaaaatacccttatgtaactgctccatctgtcccttaatagacttcccatttctccaatgcatgtttgccaatacacattttgtattgttaatatcaaaaattacatattagtaaaaattataaaagtttgattttcctaatgtacgcaatgagacgaatcaaacaagacgccatatgactatgttttttcttatacttcctatgttttttaataagtgacatgttttccttttagggaaatgtcacaataagtgacacatagctcaaagtagtaaaaatacttctcatttattacatctttgccattatttaattgtttcacctacctactttatccaatactcaaatttgattggttgaacaattggtcccaactttctctagactccttggtattccctttcccccactttctctctgtgtcacttattaaaaaatggaggacgtatattggaaaaaaattggaaggttttcttcacttatgaatagtggtaaaattagagatgggaaggctattttgggatggatggagtaatatttaaatttttaaaataatgtcattgttttagtgatgaaataaaattcaaggctattttttctagtaattatgttatctgtacatcaccacacgtatcgcgtgcatataagactagtttgatgatattccaacactgttcgaaggaagtcaggcatggaaccatgtttgcttccatatgggaaatattttgcttactctccttcaaacatctacctcattatcccagaatgattgatcgaatctaatacaaatatacaattgatcatatgccaccagggaattacatcaaattaaatttttatagaaggggaatcagtcatagcctcatagggaacgaataagtgatactcgccagtttctttcctggttacttttcctcttctcactagccatcctttatgtatgggtatgctgcatcattcctgccactggttgggactcccgtttgaactatggggggatgggaaagctaagccatcatcttcaaattgagtttcttgagaatgtaagacaccatctgtaagatgaatatagtgcactctatagtcaatgtcatgatctttatgggtttatctgctgaaataactgtgatatacccagctctccatttacaaagttttcctacatattaaactcttgcccgcaattctagaacttcattgtagaacttttcctacataagcatcatttgtcttttctgtagtaaaagttagaaagagctttattttagaacattcgtttttagttttctttgttgttgattactccgccacttttaatacttttatgattcaagtatttgacaaaatcatgtaatttaggtcctctgctgcatgcagtctataccctctctctctctctctctctctctctctctgtggttgtgtcttacttgttgagttactaactccagccattacataaagtaggctggcattatgatgagcaaattactcaagaccacatgttagctcctttttcttttctccttattctgaaaggcaaatataggtccatcttggtgcttctcatgtcataagtaagctgaccccctccttttccagggaataggacaataatccaaaagtgagggttttacatgttgggatttgtgaagtttcttattttacttaatagccgagtcagtgttacaatacatagtaccgtgttacaaaatagtatgtaacaccaagcatgtttatgtgcaaaattgtgcaagactttgttgctggcacgccaagggctgttttaatgtagtttacttattcttttaggtttttcagatgacaatcataaagggaattaggagtgtttttattgtagtcaatccctattgtgctacaacgataaaagaaaaaagcacaagactagaaggagaagtaatgtctaggaaagactcctcacctggggttgctagtcacctacacatcttagaaggcatcaaaccaaagcttattcccctcgactgttttcgggagaaaagaagacaaaattgtttctaacttatactttaccagtttcactacagcatcagaaagaagcaaaatatgctcccacaacacggcgaacctagctttccagatgtgataaaccagaccagcaaaatgattattttcactagagctttgagtctattttttcggtttttccccttcttcctggtaatgtcacgccaccaagccatcatctcaattttttgagatttgacgtaatcgctcaaatagctgagtaagacacttcttgctctaaatactaataaaaaagaggtgaatgtgggtctcagccatgttactcaaatcggataaagtgtctactcttattagggtttttgggtgttggactcatccatttttttttgtaaaatgtcaagattttggtttgaaatgagagattcaagtgtcgtgacatgagtcggcacgcaacacttaaacgtgtcgaagtaacagagggtctcagacaatcaactttaatcaatcacgaaccccaaaatttatgcaacctttgctcatattcagtctctgtaaagcactcaactgcagcacacccacccattcgcttcacctacagcaggagggcacccaagtaattgctatgatgagcgaattattctgttttgccttgctggaatattgctgttagatttgctgactcactggcagttaattatagtcagagaatgagaaatatcctgtagagagagaaagggtatcttttgtatttagctctataaatagctaaggaagggaagggcattgagagtttatgatattataataggagagatttagcctctcgaatgctgataggagcgtagctcttgttggattatcaatactactctgtttgctctatctatttctactcaggttccttcttgtacagtggatccctgattggatttacttcatcaaccagcagataaaattatttgtaggcacattgaaaccattccaaacctaatgaggccaaagtttatcacaaagaatataggagccaaatgtaggcaacagataagagtataattgccagaagttgaagactccaggtattgttcagaaaccttaatgcatatcatcattctgacactagattttccccggagccaactaacaaaaatgaattaaagagattaaggctatgtttagttcacctgaaattttctgatctgaacttatctgatctgatctgaacttattttttctgatctgatctgatctgatctgaaccaatctgattacaagatcttatcttttagatttttctcaatatataagaaaaaatatagtcatgtggggtcttgtttgattcgtctcaatgagtactttattaatattcaattattataatttttactaatatgtaatgaaagatataatgatttttaaatataagcatgatctgaactgatctgatgtgaacttattttttctgatctgatctgatctgattagatctgaaataagcaaaaataaggtgaactgaacatagcctaagcaacaattgagggaaaataagatcattatggctaagataagataaatatgtaatgataaaatcagagtaattatatcagttacactctcaacattcgtcagattgaggtttcctcccaaaatgccaacccacttttctgtattttcacgtccttctctctacccttctaggtatatattacatcagctgtaaaatttttgaaccaactagtagaatactgatctaccctcaactgcctcactttctcattttttctgggcctttttctctctagcacaagtccacataagtgatgcatagcagaaatataattccactagtcatcctcaatattgatataacaaacacatcacccacatattatcatttttaatcgctgcatgcgaggcatacttacccaccaatcaggatatgcataacagcgttcctaattccaaaaccaccatatatcttgggtttgcaactctcatccctagcaacaaggggactttctgaaaaagtggcagattccgcccacaagtagtttgtacggacacctttattatattattaatatcatatttcggcaacacaaattaccagcccagtaaaacatgaattgacatgagactaacaaggggcccaatctaatatcgtacgtctgtactaagcaatgtataaaaaaaagctcaaggtgcattgatgcaatagggatcctaatgtgcataggtgcgcctcattgaagtgaggcaccactaaggataaataaaaaagattgatgtaaaattaaattgtgcaccttgggtgcgcctcgatgaactttttttgtgtgcctaagtgtacctcaagtacgcctcattgatatcgcctcgcctggcagaaaacgagcttgaccccaatcgccttgctccccaccgcctaggcgtgcctcagtcacactttttaaatacattggtattaagtactcagaatggcaaaaagaaactttgggcattaattagacatttcactttttgtgcaactatttgtgacttcagagattgatatgttttctacattacagacttttgtgatggctgcatggtctccactgtcaaagaacattagtttaagtagaagaaatattgctctattaccttcctccctctacaaacaaaatcctaaaatgtggttatgtagtgccaattcaaacttgtagatgcatgactaatgctttcattatgctgtgggtttttatactatgattcatgtccaattacataacaattagctggagtcaggatatgtcacggaaattttaagcctggcaggatgattgtttatattttctctttttcggtgtttaagtcaaagtaaacttctaggctgctcttttataggctagttgggctgttggggagatctacacattaagtgtgaagaaatcttgtctaactccagtttggttgagaactgtaagctgtcataacatttgttgcatgatgaggccttgtgggattatcatgttagctgtaaactctaaacttacttgaaatctagtgttgtgtctccttatttctgtagtcaaaattgaaccttctgtacgtttttgatacctgcgactagaatgatggaattctgaattactgatactattacaaccatctgctaagaacgaagatgactcttagctaatttctcagcagatttagagaaattaagaagaattactaatgaatatttaaagagaaaactaccaagatatgattgtattgatgaaaaacaccaattacaacctaaccaacattcgagaggttggagctctcccaagtaaccatttctctcactaaacttatcaattttcaagatgccttttccattctcagttcctctatatttatactactccccttagcaaactacccaacttattccccaagtaaactaaagagataatatctaaaatacccttccccctacaataatattagttcttagcattaccggccccctaaacttccaccttgtcctcaaggtgggtcgtaatcatcactaaattctgggcctctactcgtatattcagtgtcttgcagcccttcaggccccaagcctaggttatgcagctcgtgttgcggctcctcctcatatagttctctggctggagtgagtgcctcaactataatgaaaaagtcctggaggtggggaaggaaggagtgtctgaaatggtgtggtgtgctgctggtgttatgggcttgtgcctgaaagttttgggtttaaagagatggagtggagaagagtggagaagtgactggagacgtaaaagaaggaatcataatttttgtaagtggtgggttgaaaaagttggtgggaagaattgtttttataaaatgtagtgtaatggtcgaaaaatgggtggagtaagtatggtttttggctggggatgtggtactgggttgaaaataaataggtctgagcttacttgtaaaattggcctcaacatgagcaggcccaatatcttgagccaattccccaaaagctggcaatagagcactcttaattgcattgttgtgggccatcgggctccaaacatatattcggaggagccggacttctttggtgatgtcattagcttggcccattgcacactttcccttaacagcctcaagatcttttcccacttttgtaccccaaccacgtggcttcaccatcctttctttcttgcttttgtcacttttttggcaatatacgagtttgtccttactaccctcatcttctaatgttggcttcctcaccaagcttaatttctggaattttgtccaccaaatcccaccacccatcgtcaacaccatacctatctacaccggccaagaagcctggtcctccacccgaattttcgccacagacaaagcctgaacaaccgtcagttctctcaccggagaagttcacaggtccaccacctgacccactagttgctgatccacccttcacaaatctccctcctctggctgccacaagtagtggttcctccgtaatactcatatttctcgtccaagagccctggaccaccaccggacccacttccaccggcaccaacttgttcaaatgatacttctctttcttttccaaacagcctacttggactggaaaaaccactgcgattgtagcctccgccagatctgtagcctagtgcacctaacgtgcttccaactgcaacccaatagggatggaaatggatgggattcggggagggtggagcatcacccgcatccgtcacccgcatccattcgctccacccgctccacccgcatccatccatccgtcacccacgggtgaaacgggtgggtcggtgataaacgggtggaaccatttagggggtgtttggtatcatgtttttttacaaaagaaacagaatcaagtaacaaaatccgtttctacttgtttggttctatgttgctcagactcgagtacccatgtccgacacgggtacgtgtccaagtgtccaactcagctattttctagaattttttatattttttaacccaaaacaaagtgtccaagtgtcccacccatgtccgactcccgaggatccgacacgggtacttgaggtgaaatgaagagtccgagcaacggaggtttggttagtgtgtaaagtaacaattaccgttacttgaggaaaacacatccccccaagttgtttccattcaaaaacctaaggaaacaaataacgtttcactcctcaaacaagaggaaagggaatgggttatatttatttccattccattaggataccaaacaactaataagggtaacacttattattatcctttcccctccttatcaaaatcctttccattccgtttacggtattcataccaaacacccccttagtatattttctaatgaaatttgtgatatgatatgcatgatataaaataattctatcaaaaatataaaaagtaagtaaacttacatgtacaacttaatagatgggtgatgggttggaggttaaacgagtgatggatcgggtgacgggtgaagaaattctcacccaccactcgctttccatccatttaaattaggtttttcatccatttaaaaaaccgggttaaacaggtgatgtatgatccatcacccatttccatcctcaaacacatcccgatttgtttactgcaccaccagatccaccagtataaccacccgaaaaatcatcatgccttctactagccttgtaacctgctcccggtgagaagcttcttccacaagtggtggtcgctggacctccatctccttcttccccaaaaaattttccatgacacccactcgacccttcatctgtgacaacctcttcttcgtccacctctgaagttttggggtcgtcttcctcctcaagctcctcttgaagtaactttaacttccgttggatgggagagaacgcttcattgattatcttcaccagatcttcttgaagtttctcgaaactttttctcacgttttcctctacctctttcgtgatttcctttccgatctccttcatttttagactaggagctcttgcgattccatggcagatttctttttttaaaacaagaaaatcaggcacttaatctcccagaatagtggtgctctgataccattttctaagaaccaagatgactcttagctaatttctcagcataacaacaaatttagagaaattaagaagaattactaatgaatatttaaagagaaaactactaagatatgattgtattgatgaaaaacaccgattacaacctaaccaagaggttggagctctcccaagtaaccatttctctcactaaacttatcaattttcaagatgccgtttactactccccttagcaaactacccaacttattccccaataaactaaagagataatatctaaaatacccttccccctacaatattagttcttagcaccatcaaactgggatggatggttttgtaaggttccaatttacttctccatcaaaatattttaggattttttatctcatgtattttagagtttcctcgtccctttttatctgataagattcttctgatgatttgattttatggtaggctccaatcagcaatattaaagaactgaagattctgaaagctggagttccattttcacttgacttcattccagaggtttgtatttttatagtggttagacatgcttcccctagttttcaaagtaaaagcatccttgttgtgacgatattttttcccttgtttttgtttttattattatcatcacttatttccattttctattttccatgctgataagatgttcatcaccataatcttgtggtatcagaagtgtttagtggagtttattcactacacatgcagttgttcttttgccatgaccgccattcattttctcgtcaaaacaaatctatgaagtttggttttcagactcatggttcttgtagctcttgtgaatttttttttcttctccttgcatgcattcttcaaattacatattgcatataccaggtgctctcctttattttatatttaatttttaaaattctatcatatattttttaatgtcaaacctcaaactaggggttcactgcatcttaggcttaccaggctaatatttctttacttaaccttttccctttatatttgctatcctcttgtgtagtaatcaccataagaagggtacaaactaaattaccctcccattcttttgtatcattctgaaatagtgtcacagagctttgatttttttgccctcatttaatctggcaaatgttctctctatttttttttttttactttcttttgacgggattctcaggcaattgttacggggagcagccagtcacactgtttctgtttattatgcaggtgagttacctgcccctctctgttatgattactgcgtttaagaagaccagcgttacaagacctcttgagggcttcggagttcttatcccttcgaatgagcaacataatggactgaagactctcggtaattgtctggttcacgtgtgtagcgaatcagattttcaaaccctgatttcgtaacattgcaggtactctgttttcatctatgatgtttccagatcgtgctttctccgatatgtatctctatactacctttgttggaggaagcagaaatagagaacttgcaaaagcttcaacgtatgagatatgcaatgttttaaatgtatgctatagtcatcgtttcaaccttttggtgcctttttcttactaatttatcctcctggtttaatgatcttagggatgaattggagcaaatagtttcgtctgatctccaccagctgttgggcactgagggaaaacctacttttgtgaagtattgatatctttcacccaacttaacatgatttgtgcttataatatgttaaataaagtaactgaaatcctgaaattaagactacgaaactgtatggtgacagtcatttttactggaacaatgcattccctttatatgggcacaattacgactcagttctgagagcaatagaaaagatggaaagagatcttcctggacttttttacgcaggtaatctgtcatttgcttgttgcgataaagttcatgtacagttggcatatcaatcaacttgcattctttcttgctaactccaaacaatcaggatcattaacttgtaggctgcagcaacagagagtatctcccaagttgttaggtttcatgtaacctcgtcgctgagatgaaatttccgttggctaaaaagtgaaagttttgtattgatgttacccaaaacaaaagtattttgcatgttgcttgaagttttggttgtttcagatagtacatcctttgacatgaaaataaatggaaaagcgtatgtcaagcaattatcatctagtttctttgtttctagatactagccgcatttgatcccagatcatttttgaggaagtcagctgaaataccgtagctatccttcagttttcataataaaactttaatggatctgatgtacagtaatttagtgtgcaccgggttaataattgatattaacttcatatagtgagtcttataaagatataatgaacttatatacaatatagtggattttattaatggaaaacatatagtgaaactatatgcaatatagtatgatacataaagacttagacaacaagagcattcgaaattacaaagaacaaaggaaagaacaattgtatcaaaccggttcgaatgaacaaacaaccaccacttccacaatcaatgtaccaccaatcaagactaaactataacaatgagcttctagtttaagtctactttgagttttaatcaccaattcaacgattagatgatcaaaattgcaaaggttaagagttggtcaaacctaaccaagagttacactaggcacatagctttgttaggagtatattagtttatgaattctagttaagttagaaatccaatacctagttggattaggattcctaattggattagaattatagtttagttagaattctagtaatagtaggcgtgtgattaggagatataattagcttaattcttatattgttagtttaattcttatcctcgttttaggtttatctttagtcgaacttgtaccctatataaggggcctttatttcattaataatatagtttattttgagtttaaacctttacttgtgattgtttgcttgagaggttattaatcgaaccattaataacttttcaggattgttaagtttttagtgttaaacatcttaatttcaggagtgattttaagagtgtttagattcttgtattcaagtttcaggactgatcttgaatcaagaaatatccctagtttcgactaatatcataagtagttcgaattcttggagtcttttcttcaagattcatattcataacttgattatttagacttcttggttttgtaatcatatcaagtggtatcagttttccagggaggagaggatacaaagggttctctttgatcaaagaagatccaagggcatcaataagaatgacacttgcaataagttcgagtgatacaaacaacttcaagactcgatcttttgctaccaagaaccaatcttgacgcctgaagattgttaggacaaaggataagaagtgtttctacatccaagattgcattctttacgtccaagattgcgtcaagatccattctttaagttcaagaaaggagtagaaagcattcgaacactacttaaacatgacatccgagatggataagctggctatggccatgagtgccttggcacaatcacaaactgagtcacgcaaccacatgggtaggatggaggcacgtgaccgtggattgaaactagatgactatagtggagatggcaatccagaagacttgttggagtggatttgccaactaggcaaagtgagtgattataggggctttgatcacaagaagagattcaaggttgcttccattaggctcacgaagtatgctggaatacggctcgaaggattgcatgcacaaacttcttgcctaatgactatgaacaaaaacagttcataaggctcgcatcaataagccaaaacacacttagtgtacacgaatacagcatggagtttgacaaattagggcttatatgtgacatagaagagaaagagcaatacaagattgcaatgtacattaaagggttgaatcgatatatagccaagaagatcgaagtctcaacttatcacttctttgaggatgtgactaaattggctaagaaattcgaagagcatgacaaagaagaagggcctaagagttcttacacacctaagtatgactctagtgctaaagggaaatcaacagttccctactcaaggtggtcggaaagacctaagaaccccactacacctaaggaggacactagcatggagaagacaaaagtggccgtacctaaggagagtttaattttgtgttttatacatctttgcttaagagcttaacaattgaaactattaataacttttcaggatggttaagtttttagtgttaaacatcttaatttcaggagtgattttaagagtatttagattcttgtattcaagtttcaggagtgatcttgaatcaagaaatatccccttgttcaactattataattgatcttattcgagttcttggagttaatttcttcaagattcatattcatacttgattattagacttcttggtttagtaatcatatcaatatcattagcattaatttacccccagggagattaagaaaggattagcctaatcaaggcgcttaagaagtttttaggaaaaatcgtgcttgttaagcttaagaattgaacttctttcaccatttgcccttgattctcttgttgaactagaagatcttggttcatagtagatgctcctgcatcatagtagagcatttaattttaattttttaacatgcacgaagatgtaggtagtgtagtatatatcgtgagacgtggtttaacatatagaaagatgtagtttctgcatgatatagtgagtttttgcatgatatagtgaatgtctgaatgatacagtggatcgttccgaattgttgtagtttgtatgatatagtatttttgtgaatgatatagtgagtttcttcatgatacaatgggtttctgaatgatatagtggattgcttagaaatgatatagtgagcttttgtatcatgtagtaggtttctatgtgatataggttgttaaaagatgatacatgcttttggcctcatgtactctaatgttaacgtgaacccggtccttgcaagtcaattgcagttttttcaatattaagctatttttttttttttttttttttttttttttttttttttgtacgggaatatttagcatctttaccacaaacataaccatacgaatattatgcggaaattccagtctgaagtcttaacttttcaaaattaaaagcttctatattatttttggaatgaaaaaaaatgagctatggcatgttattttgaaatacaatgagtctcaaggtgcatagtggcttcaattctacgaataatgaatggactactgatttctaattttttgttccgggcttttgcattaggtaaccataaagatggactctctgtgggaagaactatttcctctggatacaaagctgcggagcttgtgatatcctatctcaactctacttaagatgcctaaatgatcgaggagactccgtaagtcctttctctgattctatctttgaactgagtggaaacacgactgtggtctaaagtagttgatgtctcagatatccagaaatggcgttagtgatattcaggagctgtccattgaccctttgattcattgttgcagtttactgaaagttgttagctggtctcagaaaaacgaaaggaaaaaagggggaaaacaaaaacaaagaaacgtagattgtggtgttaaaatcaagaattccagagatttgtaccttctttatcagttgaattgtttacagtgtgaatcaagaagttagctcgaccttcttttcttgtgaatggtaagatttcgtgatcatcaatacttgattgtgctgtttgcaacttcaacggtaagatttcctgatcttacagtttaattgcttgtgctgtttgccactt

SEQ ID NO: 103 - DNA, 1575 bp, synthetic construct
  source 1..1575: mol_type = other DNA
atggtaatgctatacgattctcacctctcaggagtctcaactcatcttcaactatcgcaggcatttcccaggaagaacccattaatggccaaagtgtctgagccgggtaaacccacttctgctaaaaggattgctgttgttggtgctggtgttagtggacttgctgccgcatataagctaaagtcccatggcttgagtgtgacattgtttgaagctgatactagagctggaggaaaactcaaaactgttgcaaaggatggtttgatttgggatgagggggcaaatactatgatagagagtgaagcggaggtcacgagtttactcgatgatcttgggcttcgtgagaagcagcagtttccaatcgcgcagaacaaattatacattgcgagagacggtcgtcctgtgctgataccttcgagtcccattgcacttctcaagagcaatatcctttcagcgcaatctaagctacaacttatgttggagccattcctttggagaaaacgctatgcttctaagatttctgatgagcatgctcaggaaagtgtgggtgagttttttgagcgacattttgggaaagagtttgttgattatctaattgatccttttgtcgcgggtacaagtggaggagatcctcagtctctttctatgcgtcatgcatttccagaagtatggaatattgagaacaagtttggctcactaatttccggattaattcaatctaaactgtctccaaagaaggaaaagggtggaggaggaaagccttcttctaatgaaaagacacgcatacgtggttcgttttctttccagggtggaatgcagacacttgttgacacaatatgcaatcagtttggtaaagatgaactcaaactacagtgcaaggtcctttcattgtcctacagtcataaggggatcccttcttcagaaaattgggtcgtgtcttctgtgtcaaaaaattccattgaagatcaacaatatgatgctgtcatcgttaccgctccaatcagcaatattaaagaactgaagattctgaaagctggagttccattttcacttgacttcattccagaggtgagttacctgcccctctctgttatgattactgcgtttaagaagaccagcgttacaagacctcttgagggcttcggagttcttatcccttcgaatgagcaacataatggactgaagactctcggtactctgttttcatctatgatgtttccagatcgtgctttctccgatatgtatctctatactacctttgttggaggaagcagaaatagagaacttgcaaaagcttcaacggatgaattggagcaaatagtttcgtctgatctccaccagctgttgggcactgagggaaaacctacttttgtgaatcatttttactggaacaatgcattccctttatatgggcacaattacgactcagttctgagagcaatagaaaagatggaaagagatcttcctggacttttttacgcaggtaaccataaagatggactctctgtgggaagaactatttcctctggatacaaagctgcggagcttgtgatatcctatctcaactctacttaa

SEQ ID NO: 104 - DNA, 37006 bp, synthetic construct
  source 1..37006: mol_type = other DNA
tattccatcgaatgtagcaaattgactgtccgttgcaatttcggagtttccactcgtcgcatggtaaatggtaatgctatacgattctcacctctcaggagtctcaactcatcttcaactatcgcaggcatttcccaggaagaacccattaatggccaaagtgtctgagccgggtaaacccagtaagtcaaacattcgaatcacaactcaagcaaatttgtcttgtttgcgttatattttgctcatttcagccttttttgtttttccgacctttgcatactgaatattgtgtgtgtgtgtgtgtggggtttcagcttctgctaaaaggattgctgttgttggtgctggtgttaggtaaattttcgtctcttgcagagtttttgagtcatttgggaattctatgtgaaacttgtaactcccttcagtccaacgaacgcagtacaattttctatcaaatcatggtcctaatttccaattttccatatatattgttggaattatattgggattgtctatcactattaatagtattaggatcaattgtagagaagcacagaaatttttgggatcgaaagaatatctggattgccacattaacagcagatataattcttccaattggtttttggttcttcctaccttgacttgtctggtcaaacattataaactttaacctttaatatccattaaagtaaactataggatttttttgtctaaaacatgcttatataacatgaaatttgtgagaaaccaccttatatatatttttttgcgaaaacaaaccttaaacaaaattattatcgtgagaacaaaccttatgccaatttcgatcattgacccaaggttttggcattgaccgtgtcatgaattttgttgggtttaaaaagtcatgtgtcttgcatacgaaatggtaaatgcgggaaccttgggtcaatgtttggaatccgcataaggtttgttctcccaaaaaatgtttttgttcaaggtttgtttttgcaaaaaaacttatataaggtgctttctcagaaatttcatgttttataaagtagtatttgacaaaaaaccctaaaatatattatagaattattattgactaaattgtgtaaaaatgtactcttctaaaagtacattatagtattttagtggaacatttgcgagaaactactttataaatacgatttttgcgagaaatttcctaataaaaaaatgtgaagtgcaaaactatcttattgataattttctactccctcaaatccaaaatactatgaagtctttcctttctggtttgtcccagattagtttgtacgcttccatctttggtatgatcccacttttattatacttattagttttacgtgagttccttactctatctcttttaacaaaaatactcaactatctctatccaataaaaagttccttactagtcctatcacatctgctttttaataaaataacgtttgataaccacacaacttatatccttaaaatacacgttcaaccaagtgttgagattaatttggacggagggaataaatattttttgaggcatattggtagcagtattcggattccgataggttgactatgtttccaatgttgaccaacacttgccttgcatgtaattctaactttgctcttttttattcttcatttccctcgtattccatatacaatgtttagagacccattccttcctcttctcttctttcccttccttactatgctttgccataatcttcctcaaatgagtgcaaattaatttgtcgttgatgtaggccaactgattgtagcacatcttcatagttcatacctcaacacactcgtaattatattataccctacatgttaaatggctcatgaagctttattttatatcatacttcctccgtttcacaataagtgtaacacttttcttatttggaataatcacaataagtgaaaccaagctccaaatggtaagaaaagttcactcttattacaaatataccaccaaaaagtaagaggggatcacaacttcaatacttcttcactctactttattgtggtcccaactttctctctctaaattccttggtaactccccactttctctatgtttcacttatggtgaaatggaggaagtattttgtagtggtatttagctactaggccttggatgatatacaatcatacaatgtatttatattcacgataatttgctgcccaccttgattaccatgatttccaccaattttatcaatttcagtacttcaccaccccgaatttatattttttatttccaaccttggtatctccatttgtctgagtgcccgatccatttgtatcgcctccagaattgaagaagcttcctgcagctagacaattaggaaggttaaaaaagtttggagatggtggaggatagccataataatcattgttgggaggtggaacttggaaggttattgtagggttgaagtccttgatgaagaagaattgagttcaaatgagaggaaaaaggagcagggaagagggacaataagaaaaaaaagggtaaactaaaatcacgtgtaaggcatgtgcagatcaacatcagaaagcatagtcaacctactggtattagggcactgatacctttttgggtcaaaatttttttacaaggtatttcatgaggtagttttgtccatttttttttttacaaggtatcgtctcattttttttttatcatttagtttctcgcaataagtgtatttcatgaggtagttttttccaaaatttcctcatttattataaaatacctcatcttttccataaataatgcaatgtctagacttttacgctgtttacacatgctcctttgaccatctattgacacacaaggaaaaatagagtagagtcatgcaggatcttgttagatttttctcgatatatactttcaaaagatcaatttttttataattttttttttgaggggattttttttttataattatgtacttatcaaaggtcaaagttgtgcaccgggaagcataaaactctatgtgttgcaatttacatggaaggggaggagtataataagagaaaattatggtaaaaggttcattcctggagatcatgagaaaggaagtagaaagaacaaaaaagaacaatgggagtgcttttcaatgtttgttgtacgtagcatttattcatttgctataatgttttgtgacattgtagtggacttgctgccgcatataagctaaagtcccatggcttgagtgtgacattgtttgaagctgatactagagctggaggaaaactcaaaactgttgcaaaggatggtttgatttgggatgagggggcaaatactatggtaatgtttttgattattgcaggtcttgcactttagcgcacaattaatttctggatttttttttgtactgtggtggttatggtcatcaacatgtctcacccactgtgcttgcagatagagagtgaagcggaggtcacgagtttactcgatgatcttgggcttcgtgagaagcagcagtttgtaagtctttcattatctgaatggcacatactttatttcgaaagattgtaattgccttttctttctagatggcttcatcttcatgttgctttctgattcagtttcgtggctaactttccaagtttgtctgattgctaactctgtcatagccaattgcacaaaacaaaagatacattgcgagagacggtcgtcctgtgctggtaagtttgcttgttttacttttgacctcttttaagatctttcaactctggagcctggaaacatggtgatgcaggaggcaagttctctctattttacatcctttcttctctgtatcttatgacatttgcctcttattctgtgcagataccttcgagtcccattgcacttctcaagagcaatatcctttcagcgcaatctaaggtcgttttatgttaagacatacttgatgctgagagtttattgaattcttaaccttcttcttattttttttttatttttttagcaaaaggtaagtatattgcatttaccaaaaaacagtatgtacaccaccacagcagccatgtcagaatctagaaataccaccgaaaaaatcctacacccaaccagagacagttatattatatcctactcctaagtttctgtacccaatttacatcaatattggtccatttacaagatatttttataattcacagaagcacatcagttttaattagtttaataatgacctctggatgaataaccaactcagaccatatagccttattcctggctttccggaagttgtacgccagagcagcaagcacagcaatgcaaacctgtttcttatacctccttttatgtgtcttagcccatctcttatagctagtgaagatacagtcgtgtgcacaggattgaaccccaatccaactagcgaaagcctcacaacattatgactataaatacatctgaagtataaatgctgcacctttttctcctcttgcctgcacggtatcagaacaaatcccagctttagctaacaattccctggttttcagtttattcaatgccatcatgcaagcaatgaaagaatgttttggaacattcagtttgttccaaacacagtgagagcaagggacctttcctgcagttccacttagccacttatatccctgactaatagtatgactctttgcaccgtaaattgatttcaacttaactttttcataagcagtgaattgtgtgttgttagagtgtctagctgtctaggagattgggagaaaaggagggaccaaggagatagaaacacacctttgtgtttctttgtgtatttactttttagggtgggtcacgttttctgagaaatttgggaaaaggaagaaatagtaacacactttcccatttgtataacctgtatactggagctccaatataatttgcatttttttttgagctgcaagaatatgttgacaaacagttattgcttcttcctcagctacaacttatgttggagccattcctttggagaaaacgctatgcttctaagatttctgatgagcatgctcaggaaaggtaatgtcaagacatgtgttacctcgccttaattttcgttccaggaggtgagcatgcatttagaactaaaaggcacaaagactgttggtggtcttgcctgttcaaatataatggagaggagttttcgctacatttaccctctcttgaagtggggttgaaatatagcatcaagttgaatgcttgattaagtttaaaggacttgtgtaactctttttctgtttactgtgattacatgacctggttgattaacataatggtctgtttatctgtagtgtgggtgagttttttgagcgacattttgggaaagaggtaatggtttaccatagtatttctgctttagtggtaaattgtaatgttgctgataattatacttcgctgcagtttgttgattatctaattgatcccttcgtggcgggtacaagtggagatcctcagtctctttctgtaagtgaacattttgtgcttcactcccaattttttggaggctggaaatagattcttttccagttgttctgtcaaaaatagatgtagctttattttgaatttgaagttcccaattgttcattttgactattactgattattgctaagagtggcattatgctattatgctcctaaaagaaaggtgaattttgacctacatatagtataatgtatcaatattggtttaattgtttgttcttttgttccttttggtgctcatcttgcgccttgttctcatcgctcgttttttcatgttgcacttgatttaaatttgctcagcttaacttgtctttttgaatttatattacttattgctatattttactaatttcgttgaaactaattttttgctgaacttttcgttttgttgaaatcatttttctgaattaacttgattttcctgaatagaattgaattttggtgatcttaccttttctgcagccttttatttctttcttgtcctttttccaatctcatttttttatatttccattgtgttgacatcttatcattaactgtgcagatgcgtcatgcatttccagaagtatggaatattgagaacaagtatggaccataagacgtttattttaatcgacatgtatgtttcttagtttatacatatattaattctgtggtaaaaaaaccgaacaagaatatctttttttttttctatcatcaaaaagggtgaatatatgtagaggaaaaagatttgaatcaagatattagcctaaagcaataataatgttagtaatagctttaataacaaattcaaaacgtacattaatgaaccgagaggccggaaaatagttaaagtgaccactaagagaagcgaaggattcatgatgggttttcaacccagtagggcaaatttgttcaatgttctttacaaatcaagcttattaccttgtgggtgtttttgctagagatgaatgatagaattttccctagttggaagtcttttttggttactttatgggagctagtgatgtaatttgtttcgccttatggcatttcctaacatgtgcttttgtgatgtattgaagctttttttttgccttaatttatgctggattttaattttgttctttgtttcatttttcttgcttttgaaaaaaatatatagatatgtatatattaggattggtcgaggattttgagggaagggaaagacctaagaaaacttggatgagggtgattgatagtgatatgagtctatttgggatcgaagaaaatattcctttggataaggtgtagtggagggttgagggagcaaatttatgcagattagcttgacttaaagtttttctttttgattatttttcatttacttgtgttttgcaaacatttactcatgaatgatgtaaacttcttcaaccaaatctctggaaaaaaataatctacatggaaaaaacattattaatgttaacttgacagagatcccatccttgtgaagcagctagcaattaggcatctaacaattgacattttaatggacaggatagaatgtctcttgatagtcaataccctctgtttcattgtatcccatagctactaatctagtttgtatctttccaaagaaccattattttgaagtttcaccttgaacacccattttgaaccaatatgtttcttgcccttggggagaggggctaattgccatgttttgatgcggatgcaaagacacttgttctacctgagcctattgacttgatcatggatactctagggtttgaactcaagggaaagaatcaagtcttggcatgtgtggtgacatggcgtggggatggagtaaagaagagtcatagttctgttaggatatgttcttgcttgctacatagaatcgtagttctgttaggattgctatgatattatatctagtagatagattttatagttaattaggataaacatgtgatgatcatgttataataggcatgtgattagaggataggattagcttaattcttatcttgttgttagtttaattcttatcctagttttatgtttatcttagtcgaagttgtagccatataaagggcgttccattcattaataatacttagttttgctttgtgttttaaacatacttcttgattattgtttgcttgtgagctaactaatcaaaccattaaagacttttcaggagttttagtgctaaacatcttaatttcaggagtgattttaagagcgtttagtgatcttgaatcaagaaatatccttgttcttgttcgactaatatcagtggttttgttcgagttcttggagttaatctcttcaagattcttattcaacttgattgttgagcttattggtttagtaatcatatcaagtggtatcagttttccagggaggagaggatagataggattctctttgatcaacaaagatccaagggctatcaacaaggttcaaacattgctgcttgttcaagacttgatctttttctaccaagatgcattctttacgtcacaaggtagtaataacaagattaagagtggtttttacatccaagaatcaatctttcacgtccaagatttcatctttcacgtctaagattcattctttaagatcaagaaagttataacaagcatagaagaacacataaccatggagtccgagatggacaagcttgccaaagctatgcaagcacttgcaaagtcgcaaactgaatcacagagtcgactcaatgagaatactaccacaatcaatgggattggtagtaacatgaataggttggaggcacgcatggatgccattgcaaccatcatacaaaagaagcttgatcggaatagtgccaacttcataggtgccaattcagaggaagagttggcagaacgtgaagaaagatcatccaagactacatacaatgatgatcgtggcttaaagttggatgactataatggagatagcaatcgagaagacttgttacagtggattcgacaacttgagaaggtatgtgattatagaggctttgatgacaagaaaagattcaggattgcctccataagactcacgaaatatgctggaatttggcttgaaagcttcaaggcacaacgagccaagaaaggtaaagaaaagttgtgtagttggacaaagttgaaagttcaagcttaaagagaagttcttgcctagtgactatgaacaaaaatagttcataagactctctactataagccaagacacgcttagtgtacatgagtacaccatggaatttgacaagctagggcttatatttgacatagaggagaaagaacaatggaagattgcaagatacatcaaaggcttgaaccgccacattgccaagaaggtggaagtatccacttatcacacctttgaggatgtgacaaagttggctaagaagtttgaagaacatgagaaggaagagaagcctaagagttcttacacgcctaagtatgatactaatgctaaggccaaggctagcttcctactcaaagtggtatgaaggacctaagaggctaagaacctcaccccacctaaagaagacacaagagttgagaagcctaaagtcgtcgttccaaaggagaaatttgaagagatgagaaagtgcttcaagtgtcaaggaaggagacacatagcaagcaattgtcctaacaaaagagtcctcaccatgagacaatacctagctttgcaagaagaggaggatgtctattagttcgtccctgatgaagagcaaacttaggggaagaagaggaggaggatgcttttgctgaggatgatgcaaggctagtaggggtcaagaggcgcaccttacatgtcgaccatacacctagcatggagcaaatggaaaaatcttttccacactagatgcaaggtaggtgactatatatgtaatggtataatagatagtggttcttgcactaatgttattgtatctgaggtagtgtcaaagctaaacttagctacaagggcacaccctaagccatacaagttgagtttgctagatgatagcactggcatgagagtaaagaaacaagctttgatttcattctctataggggttataaggatgagttatggggtgatgtattgcctatgagtgcatgtcatctcttgcttggaagaccattgcagtttgataaaaaggtcatccatgagggggactctaatgtgtactctgtgttggttggttctaagagggtatgtttgcatcccttagctcctcattcagtggcgccaaagcaaccacctaagacaccaagttactttctatcttcaagggagttcgaacaagaggtggaggaagaaggttgtgcttatgccttgattgtaagacatgctgccacaagtgtcaagactactagcaatgagaagctcgaagccttgatgaaagagtttgaggatgtctttctagaggaactacgacccttgagaggcatagaacatgctgtagaccttgtacctggcgcccctttgcctaacaagcctgcttataagtgtgatccagtggcatctagggaattgcaacgccaaattgaggacctaattgaaaagggctatttaagggagatcatgagtccatgtgttgtgccagctttactagttcctaagaaagatgacacatggaggatgtgcatagatagtagagcagtgaacaacattacagtcaagtaaaggtttcctatgcctagattggaagatatgttggataagttacatggggcatcaatcttttctaagattgatcttcgaagtggctaccaccaaatgaggatcagagaaggtgatgagtggaaaacaacattcaagaccaagcagggattgtatgagtggatggtgatgccatttgccttatgcaatgcgccaagctctttcatgagcttgatgaatgaggtacttcgtccgttccttaacaagtttgtggttgtttacatagatgatatacatatctatagccaaaatgtggaggaacacttgttgaacttgcgtagcttattcatgaagcttagagagcaccaactctatggtaagattgatggcgacgaggttgacgggggattatggcggcagtgaatcaccctctttgccggtcactgaaatacaacctgaggtatctttaaattctgtaattggattgactaacccaaaaactatgaaattgctgggaaaaattgctggatgtgaagttgtggtgatgattgaccctggggcaacccataattttttatcactagctactgttgagaaattagctattcctgtgtcggaatcggaaggatttggggtttctctaggggatggacaggcggtgaggggtagtggaatttgtagaggggtgttattgagtttaaatggtggagttgaagtggaaacagattttcagcctctgggtcttggtaattcggacgtgattttgggtgtacagtggctggagacgttggggacagtggagagcaattggaaaacacaaacaatggggtttgaaatcgagggtgtcaagttcactttgaaggtgacccatcactggcgaggtctcgaatctcactcaaagccatgatacgtaccttatgtaaagagggtggaggtttgtggcttgagttgaaccagattgagcattatcaggagaaaacaccgcattcatcagccttacctgaaattccagttttcttacagagagtccttacccaatttcagtctgtgtttgctacaccagaaggcttaccaccgataagagaacatgaacatgcaatagttcttagagaagggtgtaatccggtaggggtaataccgtaccgttatccacagttccaaaaagatgagatagagcgcctcatcaaagaaatgttggcttccggaatcatcaatccttccacgagccctttctcgagcccggtgatattagtgaagaagaaagatgggtcgtggcggttttgtgtagactatcgggccctcaataaagaaacggtccccgataagtatcccattcccgtgattgatgaattgttggatgagcttcatggggcaacacttttttcaaaactcgacttaagggccgggtatcaccagatccgggttaaggccgaagacactctcaaaacagcttttcgcactcatgaggggcattacgagtttttagtaatgccatttgggttgacaaacgcgccggcaacgtttcaatcccttatgaacgaggtcttcaaaccattcttgcgcaagtttgtcttggtatttttcgacgatatattggtctacagtagttctgccaggaacatgaggagcatttgaccttggtgttgcacaccctagcagctcataaattgtttgtgaatcagaagaaatgtgattttggcaggtcggaagtagcatatatggggcatatcatctctggtcaaggggtggctgtggatatggagaaggttcaagcgatggtggaatggccccttcctaaaaacctccgggaattacggggatttttgggccttacagggtactaccgcaaattcgtacttcactatgctcatatagccaagcctttaactgatcaactcaagagagatgcgtttgggtggtctgaggcagcaactcaagcctttgaaaagctcaagaaggcgatgatcacatcccctgttttggcaatgccggacttccaagagttgtttgtggttgagaccgacgcatccgggtatggtctgggggcagtgttaatgcaaaacaaccgacccattgccttttacagtaagttgttaggtgcccgggctcaattaaagtcgatctacgaaatggagttgatggccatctgcatggcagttcagaattggagatattatctgctgggtcgacatttcctcattcgtacagaccaacagagtttacgtcatctcactcagcagcgagaagtaagtactgccttccaacgttggatgagtaaacttatggggttcgattttgaaatacagtttaagccggggtgtgccaaccgggtagctgatgcattatcccgcaagacagtgggagaggttgaattgggtgcgctgatattaactcatggggtggactggaccgacttggagcgtgaaattgaaggcgatcctctgttgtgcaaaattaaacaagacttccacgggggtgctattactcctgtgcacttttctttggtggacaacaagctgttgttcaagggtcgatacgtgattcccagctcttcggtttttattcctaccttgctgcgagaatatcacgattctcccattggagggcattcgggggacctcaaaacatatctcaggatggctgccgactggtattggaggggcatgcgcaaggatgtggcgcggtatgtgcaacattgtagcgtgtgtcaacaacaaaaaatgtctcaacagatgccagggggggtactacaaccactccccataccttcctcggtttgggatgacttgtcaatggacttcgtggaaggcttgccatcttccaagggggtaaacaccatcctcgtggtggtcgatcgtttgtctaagtacgcccacttcctcccactacgtcatccatttactgctgtgtcggtggcaaatgtgtttgtcaaagaggtggttcgtttgcatgggtttccttcctccattgtttcagatcgggatcgaatttttatgagtgtgttttggcgggaattatttcgtttacatgacaccacactcaaacgaagtaccgcgtatcatcctcaaacggatggtcagtccgaaatcgtcaatcgagctctggagacttatttgcgttgctttgtgggggaatacccgcgctcttgggctcagtggcttgggccgaattttcatataatacttctcctcatctctctaccaaaatgaccccgtcaaggtcctttatggtagagaccctcctactgtgatacgggttaatcggggagcctcacctgttgaaagcttggaaaacatgctccaagagcgagacgcagtattagatgccttgcagattaatctgattaaagctcaacagaaaatgaagagtagtgctgatgctacaagaagagaggtgcattttaaggtgggagatcgagtgtacttaaaattacagccttaccgtcagaaatctttggcttaacgcccttatgagaagttagccgcccgtttctacggaccatttactattttacagaagattgggcaagctgcatacaagttacaacttcctgtttctagcaaggtgcatccggtgtttcatgtctcccaactgaaacaggccgttggttccattcccgtttcagccactattccagagcaattgtcttctgacttggagttagaggtggaacctgatgaactcctcgatgttcgtagtgtttctagaggccagcacacttacttggaagctctcattcagtggcagggattaccatcattcgaagctacctgggaagatgtggctgctttccatcaccattttccatccttccaccttgaggacaaggtgaaactttgggggggtggtaatgtgatgcaccaaactaccactccactactcacctattagaggcgtaagaaaaagggggtaaatcaggaatagtttacaaattctgttgaaaggaatattttgtaattatgatgtcagaggttgttagcaaaaaggcagtagagtaacaataaaaaggggaagggaggagagaagaaggtattgagatttttgtaaggaacttggcccttgggagagttgggagcctctcgaaagctcaccattatcttgtgaatattttccttcctggttatatacaagaaccttcctctgtcaatttcttttctctctaatcttatttcttattctgttttctggttgccattgtttgaagttgcttgttgtgcttgagtaaatacgtgaagtggtgaaacccatctgaattcatcacatctattccaagtggtataatacaagcttgtaatccaaatctaatgagaaatctaagttatgaagaatttcaaaagaactaagtacccttgttttggatgcccaaggatttacttgccgctcaagttaatgctcaacgtgcaagatacaacctctttagtatcccaaggtagtttccataagaattaattgagctcaaatcaagaacaatatttttatgtattaatgtgaacacttcctgaattatattagatatatggtctgaaggttggaagaaagattagcttttaattttaagtttgagatagtttttagaatcgaggaaagattagctcttaacttgtaaactaaggattgctttataagtaaaacattagttatggaactcttaaaattggttttgaacatttctagttaaaaatcccatgtaattctcccaaactagcttaaaatctcacatttcacaagctaaggagagacaaatggcgttctcttgtgaaacaatctaaaattttcattaggctactgttttcaagtatttatatgttagaagtgccgcatataggtacataaaataagtttacaaacacaagtaggaataaggaaaactaaaagagaaacttcagccatacaaaaccggctgaaatcagctactactttctactttctagcttcaaaatctgattgcaagtctcctttaagccaatcaccaatgaaaacctttcctccacatgaagtgtgctcaaatcaagagaagaaacccatcattcgcctatagctacctgggtcagatgaagatacggcaaaaaaaacgctggaaatcagtgaaccaaaataagcaccaattggatgctttctgtccttgctacattttcttctcataggactacttcaagccatacatgaataagcagttagatccagctcctagcatccatttgatcgtacaaatgagctccaaaaagataagtaaaaccaagcagccaaaacctaattaatactaatgatgaattagttgaatagctaatgacgatgaagcaacactttagtaggaatagtgttaattatgatcaatgctacttaatcttctgattaatttttggaaaaatgtcatatctaccttctgtatacacttattcataactatatcgtattattattatttttaaataactaccttttaagtaccaaaacctaagaaatcaggcacttgatggattccatccaaagatccatttggcggggcccactaactgacttttgattttttgcctttcctcttttggttaatctcaatggttcatcaataacaactcaatcttctccccatttcatcaaatcatccctaaatcagaactttttcaaattcacccaaatgaggttatggaaacctctaccaagtttattcgaccacttttagtctagctcaaagttttacacttgcttcaaaaactaagatttattaactttagaaattaggtttttatttttattttttatttaactttgtaacaatcttaaataactcaggtgctttctagagtttggctttaattgtttttcccttggttatgtgaaagaagtatgactactttctccaagactaaagtagagagcaaaaaatgcaattctggaatttcttgcaaaagaaaaggaacgagttaatgataatgaaaaacaaagaaaatgatgagaagagaggagctgaatcaatcatgatcatgtattttaaagttttttttgctattgaagtgacttaagaagaggaaagaggatgagtgaagacaaacaaaagaaaggataaatagagggaaatcttgggcttagaaaggtgaaaaggtaagaagatgagttagtgggccccaacaaatgtatctttggatataatccgtcatgccactgtttggggcttgcttaagtccatacattacttcactaattttacaaaatttattttcttgaccaagaactgaaaaaaccttcagtggtgatctattaggttttggaagttaaaaggtagttatttaaatgtttttaatataaaaggtagttatttagatatttttaatataaaaggtagttatgtgaataaaagtgtatataaaatgtaattttttgacatttttgccttagtttttcttgctaattcaccttttcaacttgaccaagttgctatgaggagaaaacgagcaattattaagcaaatcgcaacactagcattaatccatggcccatgaaactctccataattagagattggattagcacttagtagaacttcttgctcctgctccaggtttccattacttctttatctaagtgcatcaaaaggttgttgggttatgaaaggtggtggttgtgtatagtcattgtcaaaatgttgttaatgcactctatttagaggatgagggattgaatagttttcacctcgtgacctttcattcctttttaaaaaaattgataatgtgtattggtcctatgactgtatgaatggtaataagctatctcatgagctgttactatcttcctcagagtctaggtagaagggtttgggctgataattttctactatgtgcaattagtttgttggatttggatatgctagttgatataggtcctttcccttgggccttctcttaatataggcctacagtgtgattgaagataaatcttctggagaatataagaacaatgagatggattggttagaggttgatttgttcttttggtgtaagactatttcgggttctctattggttatgttcagacgccagaatatgtgttggtgattgttttccatgaacatactttatccgcagagacatttttcttttttcttcctataagattatatttgtttcctctcttggtgctcatctcagtgtctctactttacgttaaactgttgacattacttgacaatgcgtatatttgtcgcatggtgctcttccctcactccacgtcgaccccatacatcaaaaaatgccattaaagaatattcgaactcacaaccttgtgttgaaagaatggaatccctaccaatgactcattaattcattttctctttaagaaataaatgatttcctcacaaacttttaggctttaagagcccaaaagataaaaacataaaataagatagacatcaacgtcaagattagccttaaatgcacaaagcacatgtcaaatgattgataactactcacgagttgcaactctttgggcgttgcctaatattaattggatctcttttaaaaattgttggtggttatggttggtggagaggaccatgtaacttttagctggtcacaactggtaatgattgtcacttttactgcccataaaaaaatttaaactgttgaatatgtttctggcagtggatctgacaaatcctttacaagttggcgtccattttgttttgccatgtgactcaattataatacgtgagttttattatccaccaggtttggctcactaatttccggattaattcaatctaaactgtctccaaagaaggaaaagggtggaggaggaaagccttcttctaatgaaaagacacgcatacgtggttcgttttctttccagggtggaatgcaggtattagcatgtagctttcattctgttaacatttgtggttcttccagacatacatccaatgctttttttttttcttgctataaccataaacattcttgtcatgaacattctttaatactgttgctgagcttagtgtattcgttcattcatgtaatttcctctcttgaggttaaaatggcatacagccttacaacctatatccataatgctccttagagtagaatccctaggttataacatagtaccacttatcaaaataaacatggcacacactgcaggacaagaagtaaatccacctagagaactgagcacctagtagtaaaagcagcgatacattactaataacagtagcagggccataagagtagtaaatgggcctcatttcaacactccccccgtaatggtgagagagaagaagcagtctgaactcccagcttggagagcaaaatagagtgttgctgaacagggagaaccttagtgaaaacatctggcacttgatcttgagatggaacataggtaggctgaataaccccttcttcatttgtattgtccctcaggaaatgacaatctatgtctacatgcttggttttctcatgatgaactagatatgctgctatggcaagagcagcttggttatcacagtagataggagtagcactggactttttaatgcgaagatctttgaggagttgtttgatccacatcacctcacacacagcaagagccatggatctgtactctgcactgaccacaagaaattgcctctttgactttcaagatacggggggagtcaccaaggagcacacaaaaccagatgtagaatttacaacacccatcccattcactatcacaaaatgctgttagttgagcactagacttgttcgccatgagaattcaccctgttggcagcttgaagatgcacattagtggggcagtgcataaatttgcttaaatcatgtatagtgaaggcaatatcaggcattgccttgtaatagtgagataaatgagcttccccatcaatttttgatacacatcaggttgttgaagaggatcaccattgtcagcatagagcttgacatgtgagtccatacgaagcctcaatcgtctgcaatttataaaaccatattcatcaacaagacccatcacatacttctttagagataaaaacgatacttcactacactgatccacttcaatcctcaaaaaatatcttaggccacccatatctttcatgtgaaattggccagcgaagaaactctttgcttcctcaatagttgctaaactattgccagcaagaatgaggtcgtccacatacaccaatatagcactgaaacagtgagagttttgcttgaagaatagagagtagtcacacttggattaagtgaatacattttgctttaaagcagtgttagcttggcaaaccattgcctcaaagcctacttcaagccataaagtgacttaagcagcttgcacaccttagttcatttggtgtcacttctgccatcagtacttagctccccctctccttgaactttgatcctgttacatgtttcactatatcctggtgatagcttcatgtatacactatcctacaattcaccatgcaaaaaagcatttttaacatccatttgtttgcaagaaccaaccctctaaggatgcaacaacaagcatgtggtcatctttgctacaggggtaaaagtctgctcataatctattccatatctctgtctgtcacccatgattacaagccttggcttatgcctattatttgtgccatcagtgctgtattttgttctgatccatccatgtgagggatggctcatttctacaaaatcctagttccgttaggatttgtgttgttttcctaattctagtaggaataggactcctaaaatcctaatcctcctagttctgttaggagtttaaaagttttagtttgattgtaattctagttgtgttagaaatccaaatcctagattcatgtcacgtatggttagaacatggctagtaggataatttgtcttgtgatgtccatagccttggcatttgtggcacctaactttcaatagcttgtcttctgtctccttttctttctccttctttgaggaatcaacgtttttagagctatctaaaccactagcatcaatattaggtttaaaagtgctaaaagatttcgaatagttcttacttgcatacaatttctttttctagtttatgtagcgtcaccagggaacaaaaactcggccgttccgttctggaacggccgctttgtaacggatttcagagaggccgttccgttaaataccgttctagaacggtgatttggaattcacaccaaactcggcgcgatagcgttacgtaacggtgtaacggcgttccagaaccgttacaatcacataacgtccgttatttgaagaagaccagttcttttggtggaggaagaagaagagccaacgcaagatctatagatctgagttaaaatttgaaaataaaacatgtttttttatttaaattaaagcttacagaggatgtagaactcaaattcgagtaaacccctcctttaatttcattaggttactgcaaatcgaaccctaaattgcaaaccctaatttcgaaaaaaccctaatatgcattgggatgcaacgctgcttctccggtcatggcagagaaggtcgacgagtcatcttcggctgcttttagcactgtagctgccggtggttggcttgtttgcaggttagtgcttgctggttttctttctctcataccgatcatcttcttcttttctctcttctctttttcttttttattgtgtgactgccagtcacgtgataattgcaactcataaagtatctctttctctctcttcttttcatccctttttatttttctttcccttttagtttttattccctcacgtggaatcacctaattttcatccttttttatttttttagttacactcttacacagaagtatgttcaaatatcattatagtacctcaaatattgtatttataagagttttggacataatatgatatagaaagtaaaatagaagaaaaataaagtttaaatgtcacttgtgtgatttttttaaaaaaattcacgccgcgacggccgcgaaacgttctatttcccgttacaagccgttcccgcgataacgcgaccgttcccgcgaacgcgaccgcgaccgcgttttttttccttgagcgtcacatcttgcaagcttcttcaaaggtgagttatgtgtacaactccaatttctctccaatcccctccgtcctcatttaggcctccaaggaagctacttaaacattgatcttcaagttcatcaattttccaaagaatggataacttctcgaactcctttatgtaatcttcaacggacatattcccttgtttaagagtagaccattccatgtacaagctttgtttgtagttagaaggaacaaaacgtcctcttaacaactttttaagcttatcccaagtagagattttgggtttattagctttcacacgctgcctctttactccatccaaccaaatagatgcatatttggttaccttaagcacggccaccttgtatttcttttcttttggtgtctcttaatcccaagtagagcttttgcgtgtgaaagctaataaacacaaaatctctacttgggataatcttcttcttgtttccgaaacaactaattcttatggtagttaggaaagcaagaatggtttctaattcaatagggaatatattaattattattagtttaagttaaatagtgcacgaatctaaatagattattcgtctcaaaatctcacttaagtatagatttgtttggacatctgagggaagaagaagagagcgagataaaggagaattatcactcaatgaatccatatcccgagttttcccatttacttctttgaaagcaatatagttcacgaggtcttattatcagtctatggacataagagtaataatttaagggcaaaaactatgactttatgggtttaaactgatacatgttctgttaaactgatagatgttctgtgttaaaccgatactcatatattcctggttaaactgatagatatatgatttaaattgatacccgtctcagtcatgtcttggattgagacggtctgacacaagactttttgtgtattatatatctgattagaataaatttatcctgtttactaattattttatcttctccagacacttgttgacacaatatgcaatcagtttggtaaagatgaactcaaactacagtgcaaggtcctttcattgtcctacagtcataaggggatcccttcttcagaaaattgggtcgtgtcttctgtgtcaaaaaattccattgaagatcaacaatatgatgctgtcatcgttaccgtgagttttactttgcttactgctattgcaccaatctttcttcttttgacacactgataatggcaatgctgttgtggtttgaagccatgttatggggttttagggatatttatggagtctgatctaatatgttattggataaaattcagatctgtaacgtgactcaatgagattgaaaaaaattgaatcaagataatggattggaaaattaggagctaacctagggtctataagcgatccacttggagtctcataccaagcaggtattcgacattttaggtttatattgctgctatggctcatatgggagcctacatagggtctggtgcttattcctttttcttttgtctagttttggggctgcacatttctgttgtgttttgatatggatagccatcacctgcaattgcatggaggctgaactaagttctataggggagcaaacagtatctgttggaaatttattttcatattgtgtttttaaatgctataatccaaaatttgttgttcccctaaaatgcctaaaatacccttatgtaactgctccatctgtcccttaatagacttcccatttctccaatgcatgtttgccaatacacattttgtattgttaatatcaaaaattacatattagtaaaaattataaaagtttgattttcctaatgtacgcaatgagacgaatcaaacaagacgccatatgactatgttttttcttatacttcctatgttttttaataagtgacatgttttccttttagggaaatgtcacaataagtgacacatagctcaaagtagtaaaaatacttctcatttattacatctttgccattatttaattgtttcacctacctactttatccaatactcaaatttgattggttgaacaattggtcccaactttctctagactccttggtattccctttcccccactttctctctgtgtcacttattaaaaaatggaggacgtatattggaaaaaaattggaaggttttcttcacttatgaatagtggtaaaattagagatgggaaggctattttgggatggatggagtaatatttaaatttttaaaataatgtcattgttttagtgatgaaataaaattcaaggctattttttctagtaattatgttatctgtacatcaccacacgtatcgcgtgcatataagactagtttgatgatattccaacactgttcgaaggaagtcaggcatggaaccatgtttgcttccatatgggaaatattttgcttactctccttcaaacatctacctcattatcccagaatgattgatcgaatctaatacaaatatacaattgatcatatgccaccagggaattacatcaaattaaatttttatagaaggggaatcagtcatagcctcatagggaacgaataagtgatactcgccagtttctttcctggttacttttcctcttctcactagccatcctttatgtatgggtatgctgcatcattcctgccactggttgggactcccgtttgaactatggggggatgggaaagctaagccatcatcttcaaattgagtttcttgagaatgtaagacaccatctgtaagatgaatatagtgcactctatagtcaatgtcatgatctttatgggtttatctgctgaaataactgtgatatacccagctctccatttacaaagttttcctacatattaaactcttgcccgcaattctagaacttcattgtagaacttttcctacataagcatcatttgtcttttctgtagtaaaagttagaaagagctttattttagaacattcgtttttagttttctttgttgttgattactccgccacttttaatacttttatgattcaagtatttgacaaaatcatgtaatttaggtcctctgctgcatgcagtctataccctctctctctctctctctctctctctctctgtggttgtgtcttacttgttgagttactaactccagccattacataaagtaggctggcattatgatgagcaaattactcaagaccacatgttagctcctttttcttttctccttattctgaaaggcaaatataggtccatcttggtgcttctcatgtcataagtaagctgaccccctccttttccagggaataggacaataatccaaaagtgagggttttacatgttgggatttgtgaagtttcttattttacttaatagccgagtcagtgttacaatacatagtaccgtgttacaaaatagtatgtaacaccaagcatgtttatgtgcaaaattgtgcaagactttgttgctggcacgccaagggctgttttaatgtagtttacttattcttttaggtttttcagatgacaatcataaagggaattaggagtgtttttattgtagtcaatccctattgtgctacaacgataaaagaaaaaagcacaagactagaaggagaagtaatgtctaggaaagactcctcacctggggttgctagtcacctacacatcttagaaggcatcaaaccaaagcttattcccctcgactgttttcgggagaaaagaagacaaaattgtttctaacttatactttaccagtttcactacagcatcagaaagaagcaaaatatgctcccacaacacggcgaacctagctttccagatgtgataaaccagaccagcaaaatgattattttcactagagctttgagtctattttttcggtttttccccttcttcctggtaatgtcacgccaccaagccatcatctcaattttttgagatttgacgtaatcgctcaaatagctgagtaagacacttcttgctctaaatactaataaaaaagaggtgaatgtgggtctcagccatgttactcaaatcggataaagtgtctactcttattagggtttttgggtgttggactcatccatttttttttgtaaaatgtcaagattttggtttgaaatgagagattcaagtgtcgtgacatgagtcggcacgcaacacttaaacgtgtcgaagtaacagagggtctcagacaatcaactttaatcaatcacgaaccccaaaatttatgcaacctttgctcatattcagtctctgtaaagcactcaactgcagcacacccacccattcgcttcacctacagcaggagggcacccaagtaattgctatgatgagcgaattattctgttttgccttgctggaatattgctgttagatttgctgactcactggcagttaattatagtcagagaatgagaaatatcctgtagagagagaaagggtatcttttgtatttagctctataaatagctaaggaagggaagggcattgagagtttatgatattataataggagagatttagcctctcgaatgctgataggagcgtagctcttgttggattatcaatactactctgtttgctctatctatttctactcaggttccttcttgtacagtggatccctgattggatttacttcatcaaccagcagataaaattatttgtaggcacattgaaaccattccaaacctaatgaggccaaagtttatcacaaagaatataggagccaaatgtaggcaacagataagagtataattgccagaagttgaagactccaggtattgttcagaaaccttaatgcatatcatcattctgacactagattttccccggagccaactaacaaaaatgaattaaagagattaaggctatgtttagttcacctgaaattttctgatctgaacttatctgatctgatctgaacttattttttctgatctgatctgatctgatctgaaccaatctgattacaagatcttatcttttagatttttctcaatatataagaaaaaatatagtcatgtggggtcttgtttgattcgtctcaatgagtactttattaatattcaattattataatttttactaatatgtaatgaaagatataatgatttttaaatataagcatgatctgaactgatctgatgtgaacttattttttctgatctgatctgatctgattagatctgaaataagcaaaaataaggtgaactgaacatagcctaagcaacaattgagggaaaataagatcattatggctaagataagataaatatgtaatgataaaatcagagtaattatatcagttacactctcaacattcgtcagattgaggtttcctcccaaaatgccaacccacttttctgtattttcacgtccttctctctacccttctaggtatatattacatcagctgtaaaatttttgaaccaactagtagaatactgatctaccctcaactgcctcactttctcattttttctgggcctttttctctctagcacaagtccacataagtgatgcatagcagaaatataattccactagtcatcctcaatattgatataacaaacacatcacccacatattatcatttttaatcgctgcatgcgaggcatacttacccaccaatcaggatatgcataacagcgttcctaattccaaaaccaccatatatcttgggtttgcaactctcatccctagcaacaaggggactttctgaaaaagtggcagattccgcccacaagtagtttgtacggacacctttattatattattaatatcatatttcggcaacacaaattaccagcccagtaaaacatgaattgacatgagactaacaaggggcccaatctaatatcgtacgtctgtactaagcaatgtataaaaaaaagctcaaggtgcattgatgcaatagggatcctaatgtgcataggtgcgcctcattgaagtgaggcaccactaaggataaataaaaaagattgatgtaaaattaaattgtgcaccttgggtgcgcctcgatgaactttttttgtgtgcctaagtgtacctcaagtacgcctcattgatatcgcctcgcctggcagaaaacgagcttgaccccaatcgccttgctccccaccgcctaggcgtgcctcagtcacactttttaaatacattggtattaagtactcagaatggcaaaaagaaactttgggcattaattagacatttcactttttgtgcaactatttgtgacttcagagattgatatgttttctacattacagacttttgtgatggctgcatggtctccactgtcaaagaacattagtttaagtagaagaaatattgctctattaccttcctccctctacaaacaaaatcctaaaatgtggttatgtagtgccaattcaaacttgtagatgcatgactaatgctttcattatgctgtgggtttttatactatgattcatgtccaattacataacaattagctggagtcaggatatgtcacggaaattttaagcctggcaggatgattgtttatattttctctttttcggtgtttaagtcaaagtaaacttctaggctgctcttttataggctagttgggctgttggggagatctacacattaagtgtgaagaaatcttgtctaactccagtttggttgagaactgtaagctgtcataacatttgttgcatgatgaggccttgtgggattatcatgttagctgtaaactctaaacttacttgaaatctagtgttgtgtctccttatttctgtagtcaaaattgaaccttctgtacgtttttgatacctgcgactagaatgatggaattctgaattactgatactattacaaccatctgctaagaacgaagatgactcttagctaatttctcagcagatttagagaaattaagaagaattactaatgaatatttaaagagaaaactaccaagatatgattgtattgatgaaaaacaccaattacaacctaaccaacattcgagaggttggagctctcccaagtaaccatttctctcactaaacttatcaattttcaagatgccttttccattctcagttcctctatatttatactactccccttagcaaactacccaacttattccccaagtaaactaaagagataatatctaaaatacccttccccctacaataatattagttcttagcattaccggccccctaaacttccaccttgtcctcaaggtgggtcgtaatcatcactaaattctgggcctctactcgtatattcagtgtcttgcagcccttcaggccccaagcctaggttatgcagctcgtgttgcggctcctcctcatatagttctctggctggagtgagtgcctcaactataatgaaaaagtcctggaggtggggaaggaaggagtgtctgaaatggtgtggtgtgctgctggtgttatgggcttgtgcctgaaagttttgggtttaaagagatggagtggagaagagtggagaagtgactggagacgtaaaagaaggaatcataatttttgtaagtggtgggttgaaaaagttggtgggaagaattgtttttataaaatgtagtgtaatggtcgaaaaatgggtggagtaagtatggtttttggctggggatgtggtactgggttgaaaataaataggtctgagcttacttgtaaaattggcctcaacatgagcaggcccaatatcttgagccaattccccaaaagctggcaatagagcactcttaattgcattgttgtgggccatcgggctccaaacatatattcggaggagccggacttctttggtgatgtcattagcttggcccattgcacactttcccttaacagcctcaagatcttttcccacttttgtaccccaaccacgtggcttcaccatcctttctttcttgcttttgtcacttttttggcaatatacgagtttgtccttactaccctcatcttctaatgttggcttcctcaccaagcttaatttctggaattttgtccaccaaatcccaccacccatcgtcaacaccatacctatctacaccggccaagaagcctggtcctccacccgaattttcgccacagacaaagcctgaacaaccgtcagttctctcaccggagaagttcacaggtccaccacctgacccactagttgctgatccacccttcacaaatctccctcctctggctgccacaagtagtggttcctccgtaatactcatatttctcgtccaagagccctggaccaccaccggacccacttccaccggcaccaacttgttcaaatgatacttctctttcttttccaaacagcctacttggactggaaaaaccactgcgattgtagcctccgccagatctgtagcctagtgcacctaacgtgcttccaactgcaacccaatagggatggaaatggatgggattcggggagggtggagcatcacccgcatccgtcacccgcatccattcgctccacccgctccacccgcatccatccatccgtcacccacgggtgaaacgggtgggtcggtgataaacgggtggaaccatttagggggtgtttggtatcatgtttttttacaaaagaaacagaatcaagtaacaaaatccgtttctacttgtttggttctatgttgctcagactcgagtacccatgtccgacacgggtacgtgtccaagtgtccaactcagctattttctagaattttttatattttttaacccaaaacaaagtgtccaagtgtcccacccatgtccgactcccgaggatccgacacgggtacttgaggtgaaatgaagagtccgagcaacggaggtttggttagtgtgtaaagtaacaattaccgttacttgaggaaaacacatccccccaagttgtttccattcaaaaacctaaggaaacaaataacgtttcactcctcaaacaagaggaaagggaatgggttatatttatttccattccattaggataccaaacaactaataagggtaacacttattattatcctttcccctccttatcaaaatcctttccattccgtttacggtattcataccaaacacccccttagtatattttctaatgaaatttgtgatatgatatgcatgatataaaataattctatcaaaaatataaaaagtaagtaaacttacatgtacaacttaatagatgggtgatgggttggaggttaaacgagtgatggatcgggtgacgggtgaagaaattctcacccaccactcgctttccatccatttaaattaggtttttcatccatttaaaaaaccgggttaaacaggtgatgtatgatccatcacccatttccatcctcaaacacatcccgatttgtttactgcaccaccagatccaccagtataaccacccgaaaaatcatcatgccttctactagccttgtaacctgctcccggtgagaagcttcttccacaagtggtggtcgctggacctccatctccttcttccccaaaaaattttccatgacacccactcgacccttcatctgtgacaacctcttcttcgtccacctctgaagttttggggtcgtcttcctcctcaagctcctcttgaagtaactttaacttccgttggatgggagagaacgcttcattgattatcttcaccagatcttcttgaagtttctcgaaactttttctcacgttttcctctacctctttcgtgatttcctttccgatctccttcatttttagactaggagctcttgcgattccatggcagatttctttttttaaaacaagaaaatcaggcacttaatctcccagaatagtggtgctctgataccattttctaagaaccaagatgactcttagctaatttctcagcataacaacaaatttagagaaattaagaagaattactaatgaatatttaaagagaaaactactaagatatgattgtattgatgaaaaacaccgattacaacctaaccaagaggttggagctctcccaagtaaccatttctctcactaaacttatcaattttcaagatgccgtttactactccccttagcaaactacccaacttattccccaataaactaaagagataatatctaaaatacccttccccctacaatattagttcttagcaccatcaaactgggatggatggttttgtaaggttccaatttacttctccatcaaaatattttaggattttttatctcatgtattttagagtttcctcgtccctttttatctgataagattcttctgatgatttgattttatggtaggctccaatcagcaatattaaagaactgaagattctgaaagctggagttccattttcacttgacttcattccagaggtttgtatttttatagtggttagacatgcttcccctagttttcaaagtaaaagcatccttgttgtgacgatattttttcccttgtttttgtttttattattatcatcacttatttccattttctattttccatgctgataagatgttcatcaccataatcttgtggtatcagaagtgtttagtggagtttattcactacacatgcagttgttcttttgccatgaccgccattcattttctcgtcaaaacaaatctatgaagtttggttttcagactcatggttcttgtagctcttgtgaatttttttttcttctccttgcatgcattcttcaaattacatattgcatataccaggtgctctcctttattttatatttaatttttaaaattctatcatatattttttaatgtcaaacctcaaactaggggttcactgcatcttaggcttaccaggctaatatttctttacttaaccttttccctttatatttgctatcctcttgtgtagtaatcaccataagaagggtacaaactaaattaccctcccattcttttgtatcattctgaaatagtgtcacagagctttgatttttttgccctcatttaatctggcaaatgttctctctatttttttttttttactttcttttgacgggattctcaggcaattgttacggggagcagccagtcacactgtttctgtttattatgcaggtgagttacctgcccctctctgttatgattactgcgtttaagaagaccagcgttacaagacctcttgagggcttcggagttcttatcccttcgaatgagcaacataatggactgaagactctcggtaattgtctggttcacgtgtgtagcgaatcagattttcaaaccctgatttcgtaacattgcaggtactctgttttcatctatgatgtttccagatcgtgctttctccgatatgtatctctatactacctttgttggaggaagcagaaatagagaacttgcaaaagcttcaacgtatgagatatgcaatgttttaaatgtatgctatagtcatcgtttcaaccttttggtgcctttttcttactaatttatcctcctggtttaatgatcttagggatgaattggagcaaatagtttcgtctgatctccaccagctgttgggcactgagggaaaacctacttttgtgaagtattgatatctttcacccaacttaacatgatttgtgcttataatatgttaaataaagtaactgaaatcctgaaattaagactacgaaactgtatggtgacagtcatttttactggaacaatgcattccctttatatgggcacaattacgactcagttctgagagcaatagaaaagatggaaagagatcttcctggacttttttacgcaggtaatctgtcatttgcttgttgcgataaagttcatgtacagttggcatatcaatcaacttgcattctttcttgctaactccaaacaatcaggatcattaacttgtaggctgcagcaacagagagtatctcccaagttgttaggtttcatgtaacctcgtcgctgagatgaaatttccgttggctaaaaagtgaaagttttgtattgatgttacccaaaacaaaagtattttgcatgttgcttgaagttttggttgtttcagatagtacatcctttgacatgaaaataaatggaaaagcgtatgtcaagcaattatcatctagtttctttgtttctagatactagccgcatttgatcccagatcatttttgaggaagtcagctgaaataccgtagctatccttcagttttcataataaaactttaatggatctgatgtacagtaatttagtgtgcaccgggttaataattgatattaacttcatatagtgagtcttataaagatataatgaacttatatacaatatagtggattttattaatggaaaacatatagtgaaactatatgcaatatagtatgatacataaagacttagacaacaagagcattcgaaattacaaagaacaaaggaaagaacaattgtatcaaaccggttcgaatgaacaaacaaccaccacttccacaatcaatgtaccaccaatcaagactaaactataacaatgagcttctagtttaagtctactttgagttttaatcaccaattcaacgattagatgatcaaaattgcaaaggttaagagttggtcaaacctaaccaagagttacactaggcacatagctttgttaggagtatattagtttatgaattctagttaagttagaaatccaatacctagttggattaggattcctaattggattagaattatagtttagttagaattctagtaatagtaggcgtgtgattaggagatataattagcttaattcttatattgttagtttaattcttatcctcgttttaggtttatctttagtcgaacttgtaccctatataaggggcctttatttcattaataatatagtttattttgagtttaaacctttacttgtgattgtttgcttgagaggttattaatcgaaccattaataacttttcaggattgttaagtttttagtgttaaacatcttaatttcaggagtgattttaagagtgtttagattcttgtattcaagtttcaggactgatcttgaatcaagaaatatccctagtttcgactaatatcataagtagttcgaattcttggagtcttttcttcaagattcatattcataacttgattatttagacttcttggttttgtaatcatatcaagtggtatcagttttccagggaggagaggatacaaagggttctctttgatcaaagaagatccaagggcatcaataagaatgacacttgcaataagttcgagtgatacaaacaacttcaagactcgatcttttgctaccaagaaccaatcttgacgcctgaagattgttaggacaaaggataagaagtgtttctacatccaagattgcattctttacgtccaagattgcgtcaagatccattctttaagttcaagaaaggagtagaaagcattcgaacactacttaaacatgacatccgagatggataagctggctatggccatgagtgccttggcacaatcacaaactgagtcacgcaaccacatgggtaggatggaggcacgtgaccgtggattgaaactagatgactatagtggagatggcaatccagaagacttgttggagtggatttgccaactaggcaaagtgagtgattataggggctttgatcacaagaagagattcaaggttgcttccattaggctcacgaagtatgctggaatacggctcgaaggattgcatgcacaaacttcttgcctaatgactatgaacaaaaacagttcataaggctcgcatcaataagccaaaacacacttagtgtacacgaatacagcatggagtttgacaaattagggcttatatgtgacatagaagagaaagagcaatacaagattgcaatgtacattaaagggttgaatcgatatatagccaagaagatcgaagtctcaacttatcacttctttgaggatgtgactaaattggctaagaaattcgaagagcatgacaaagaagaagggcctaagagttcttacacacctaagtatgactctagtgctaaagggaaatcaacagttccctactcaaggtggtcggaaagacctaagaaccccactacacctaaggaggacactagcatggagaagacaaaagtggccgtacctaaggagagtttaattttgtgttttatacatctttgcttaagagcttaacaattgaaactattaataacttttcaggatggttaagtttttagtgttaaacatcttaatttcaggagtgattttaagagtatttagattcttgtattcaagtttcaggagtgatcttgaatcaagaaatatccccttgttcaactattataattgatcttattcgagttcttggagttaatttcttcaagattcatattcatacttgattattagacttcttggtttagtaatcatatcaatatcattagcattaatttacccccagggagattaagaaaggattagcctaatcaaggcgcttaagaagtttttaggaaaaatcgtgcttgttaagcttaagaattgaacttctttcaccatttgcccttgattctcttgttgaactagaagatcttggttcatagtagatgctcctgcatcatagtagagcatttaattttaattttttaacatgcacgaagatgtaggtagtgtagtatatatcgtgagacgtggtttaacatatagaaagatgtagtttctgcatgatatagtgagtttttgcatgatatagtgaatgtctgaatgatacagtggatcgttccgaattgttgtagtttgtatgatatagtatttttgtgaatgatatagtgagtttcttcatgatacaatgggtttctgaatgatatagtggattgcttagaaatgatatagtgagcttttgtatcatgtagtaggtttctatgtgatataggttgttaaaagatgatacatgcttttggcctcatgtactctaatgttaacgtgaacccggtccttgcaagtcaattgcagttttttcaatattaagctatttttttttttttttttttttttttttttttttttttgtacgggaatatttagcatctttaccacaaacataaccatacgaatattatgcggaaattccagtctgaagtcttaacttttcaaaattaaaagcttctatattatttttggaatgaaaaaaaatgagctatggcatgttattttgaaatacaatgagtctcaaggtgcatagtggcttcaattctacgaataatgaatggactactgatttctaattttttgttccgggcttttgcattaggtaaccataaagatggactctctgtgggaagaactatttcctctggatacaaagctgcggagcttgtgatatcctatctcaactctacttaagatgcctaaatgatcgaggagactccgtaagtcctttctctgattctatctttgaactgagtggaaacacgactgtggtctaaagtagttgatgtctcagatatccagaaatggcgttagtgatattcaggagctgtccattgaccctttgattcattgttgcagtttactgaaagttgttagctggtctcagaaaaacgaaaggaaaaaagggggaaaacaaaaacaaagaaacgtagattgtggtgttaaaatcaagaattccagagatttgtaccttctttatcagttgaattgtttacagtgtgaatcaagaagttagctcgaccttcttttcttgtgaatggtaagatttcgtgatcatcaatacttgattgtgctgtttgcaacttcaacggtaagatttcctgatcttacagtttaattgcttgtgctgtttgccactt

SEQ ID NO: 105 - DNA, 1572 bp, synthetic construct
  source 1..1572: mol_type = other DNA
atggtaatgctatacgattctcacctctcaggagtctcaactcatcttcaactatcgcaggcatttcccaggaagaacccattaatggccaaagtgtctgagccgggtaaacccacttctgctaaaaggattgctgttgttggtgctggtgttagtggacttgctgccgcatataagctaaagtcccatggcttgagtgtgacattgtttgaagctgatactagagctggaggaaaactcaaaactgttgcaaaggatggtttgatttgggatgagggggcaaatactatgatagagagtgaagcggaggtcacgagtttactcgatgatcttgggcttcgtgagaagcagcagtttccaattgcacaaaacaaaagatacattgcgagagacggtcgtcctgtgctgataccttcgagtcccattgcacttctcaagagcaatatcctttcagcgcaatctaagctacaacttatgttggagccattcctttggagaaaacgctatgcttctaagatttctgatgagcatgctcaggaaagtgtgggtgagttttttgagcgacattttgggaaagagtttgttgattatctaattgatcccttcgtggcgggtacaagtggagatcctcagtctctttctatgcgtcatgcatttccagaagtatggaatattgagaacaagtttggctcactaatttccggattaattcaatctaaactgtctccaaagaaggaaaagggtggaggaggaaagccttcttctaatgaaaagacacgcatacgtggttcgttttctttccagggtggaatgcagacacttgttgacacaatatgcaatcagtttggtaaagatgaactcaaactacagtgcaaggtcctttcattgtcctacagtcataaggggatcccttcttcagaaaattgggtcgtgtcttctgtgtcaaaaaattccattgaagatcaacaatatgatgctgtcatcgttaccgctccaatcagcaatattaaagaactgaagattctgaaagctggagttccattttcacttgacttcattccagaggtgagttacctgcccctctctgttatgattactgcgtttaagaagaccagcgttacaagacctcttgagggcttcggagttcttatcccttcgaatgagcaacataatggactgaagactctcggtactctgttttcatctatgatgtttccagatcgtgctttctccgatatgtatctctatactacctttgttggaggaagcagaaatagagaacttgcaaaagcttcaacggatgaattggagcaaatagtttcgtctgatctccaccagctgttgggcactgagggaaaacctacttttgtgaatcatttttactggaacaatgcattccctttatatgggcacaattacgactcagttctgagagcaatagaaaagatggaaagagatcttcctggacttttttacgcaggtaaccataaagatggactctctgtgggaagaactatttcctctggatacaaagctgcggagcttgtgatatcctatctcaactctacttaa

SEQ ID NO: 106 - DNA, 37009 bp, synthetic construct
  source 1..37009: mol_type = other DNA
tattccatcgaatgtagcaaattgactgtccgttgcaatttcggagtttccactcgtcgcatggtaaatggtaatgctatacgattctcacctctcaggagtctcaactcatcttcaactatcgcaggcatttcccaggaagaacccattaatggccaaagtgtctgagccgggtaaacccagtaagtcaaacattcgaatcacaactcaagcaaatttgtcttgtttgcgttatattttgctcatttcagccttttttgtttttccgacctttgcatactgaatattgtgtgtgtgtgtgtgtggggtttcagcttctgctaaaaggattgctgttgttggtgctggtgttaggtaaattttcgtctcttgcagagtttttgagtcatttgggaattctatgtgaaacttgtaactcccttcagtccaacgaacgcagtacaattttctatcaaatcatggtcctaatttccaattttccatatatattgttggaattatattgggattgtctatcactattaatagtattaggatcaattgtagagaagcacagaaatttttgggatcgaaagaatatctggattgccacattaacagcagatataattcttccaattggtttttggttcttcctaccttgacttgtctggtcaaacattataaactttaacctttaatatccattaaagtaaactataggatttttttgtctaaaacatgcttatataacatgaaatttgtgagaaaccaccttatatatatttttttgcgaaaacaaaccttaaacaaaattattatcgtgagaacaaaccttatgccaatttcgatcattgacccaaggttttggcattgaccgtgtcatgaattttgttgggtttaaaaagtcatgtgtcttgcatacgaaatggtaaatgcgggaaccttgggtcaatgtttggaatccgcataaggtttgttctcccaaaaaatgtttttgttcaaggtttgtttttgcaaaaaaacttatataaggtgctttctcagaaatttcatgttttataaagtagtatttgacaaaaaaccctaaaatatattatagaattattattgactaaattgtgtaaaaatgtactcttctaaaagtacattatagtattttagtggaacatttgcgagaaactactttataaatacgatttttgcgagaaatttcctaataaaaaaatgtgaagtgcaaaactatcttattgataattttctactccctcaaatccaaaatactatgaagtctttcctttctggtttgtcccagattagtttgtacgcttccatctttggtatgatcccacttttattatacttattagttttacgtgagttccttactctatctcttttaacaaaaatactcaactatctctatccaataaaaagttccttactagtcctatcacatctgctttttaataaaataacgtttgataaccacacaacttatatccttaaaatacacgttcaaccaagtgttgagattaatttggacggagggaataaatattttttgaggcatattggtagcagtattcggattccgataggttgactatgtttccaatgttgaccaacacttgccttgcatgtaattctaactttgctcttttttattcttcatttccctcgtattccatatacaatgtttagagacccattccttcctcttctcttctttcccttccttactatgctttgccataatcttcctcaaatgagtgcaaattaatttgtcgttgatgtaggccaactgattgtagcacatcttcatagttcatacctcaacacactcgtaattatattataccctacatgttaaatggctcatgaagctttattttatatcatacttcctccgtttcacaataagtgtaacacttttcttatttggaataatcacaataagtgaaaccaagctccaaatggtaagaaaagttcactcttattacaaatataccaccaaaaagtaagaggggatcacaacttcaatacttcttcactctactttattgtggtcccaactttctctctctaaattccttggtaactccccactttctctatgtttcacttatggtgaaatggaggaagtattttgtagtggtatttagctactaggccttggatgatatacaatcatacaatgtatttatattcacgataatttgctgcccaccttgattaccatgatttccaccaattttatcaatttcagtacttcaccaccccgaatttatattttttatttccaaccttggtatctccatttgtctgagtgcccgatccatttgtatcgcctccagaattgaagaagcttcctgcagctagacaattaggaaggttaaaaaagtttggagatggtggaggatagccataataatcattgttgggaggtggaacttggaaggttattgtagggttgaagtccttgatgaagaagaattgagttcaaatgagaggaaaaaggagcagggaagagggacaataagaaaaaaaagggtaaactaaaatcacgtgtaaggcatgtgcagatcaacatcagaaagcatagtcaacctactggtattagggcactgatacctttttgggtcaaaatttttttacaaggtatttcatgaggtagttttgtccatttttttttttacaaggtatcgtctcattttttttttatcatttagtttctcgcaataagtgtatttcatgaggtagttttttccaaaatttcctcatttattataaaatacctcatcttttccataaataatgcaatgtctagacttttacgctgtttacacatgctcctttgaccatctattgacacacaaggaaaaatagagtagagtcatgcaggatcttgttagatttttctcgatatatactttcaaaagatcaatttttttataattttttttttgaggggattttttttttataattatgtacttatcaaaggtcaaagttgtgcaccgggaagcataaaactctatgtgttgcaatttacatggaaggggaggagtataataagagaaaattatggtaaaaggttcattcctggagatcatgagaaaggaagtagaaagaacaaaaaagaacaatgggagtgcttttcaatgtttgttgtacgtagcatttattcatttgctataatgttttgtgacattgtagtggacttgctgccgcatataagctaaagtcccatggcttgagtgtgacattgtttgaagctgatactagagctggaggaaaactcaaaactgttgcaaaggatggtttgatttgggatgagggggcaaatactatggtaatgtttttgattattgcaggtcttgcactttagcgcacaattaatttctggatttttttttgtactgtggtggttatggtcatcaacatgtctcacccactgtgcttgcagatagagagtgaagcggaggtcacgagtttactcgatgatcttgggcttcgtgagaagcagcagtttgtaagtctttcattatctgaatggcacatactttatttcgaaagattgtaattgccttttctttctagatggcttcatcttcatgttgctttctgattcagtttcgtggctaactttccaagtttgtctgattgctaactctgtcatagccaattgcacaaaacaaaagatacattgcgagagacggtcgtcctgtgctggtaagtttgcttgttttacttttgacctcttttaagatctttcaactctggagcctggaaacatggtgatgcaggaggcaagttctctctattttacatcctttcttctctgtatcttatgacatttgcctcttattctgtgcagataccttcgagtcccattgcacttctcaagagcaatatcctttcagcgcaatctaaggtcgttttatgttaagacatacttgatgctgagagtttattgaattcttaaccttcttcttattttttttttatttttttagcaaaaggtaagtatattgcatttaccaaaaaacagtatgtacaccaccacagcagccatgtcagaatctagaaataccaccgaaaaaatcctacacccaaccagagacagttatattatatcctactcctaagtttctgtacccaatttacatcaatattggtccatttacaagatatttttataattcacagaagcacatcagttttaattagtttaataatgacctctggatgaataaccaactcagaccatatagccttattcctggctttccggaagttgtacgccagagcagcaagcacagcaatgcaaacctgtttcttatacctccttttatgtgtcttagcccatctcttatagctagtgaagatacagtcgtgtgcacaggattgaaccccaatccaactagcgaaagcctcacaacattatgactataaatacatctgaagtataaatgctgcacctttttctcctcttgcctgcacggtatcagaacaaatcccagctttagctaacaattccctggttttcagtttattcaatgccatcatgcaagcaatgaaagaatgttttggaacattcagtttgttccaaacacagtgagagcaagggacctttcctgcagttccacttagccacttatatccctgactaatagtatgactctttgcaccgtaaattgatttcaacttaactttttcataagcagtgaattgtgtgttgttagagtgtctagctgtctaggagattgggagaaaaggagggaccaaggagatagaaacacacctttgtgtttctttgtgtatttactttttagggtgggtcacgttttctgagaaatttgggaaaaggaagaaatagtaacacactttcccatttgtataacctgtatactggagctccaatataatttgcatttttttttgagctgcaagaatatgttgacaaacagttattgcttcttcctcagctacaacttatgttggagccattcctttggagaaaacgctatgcttctaagatttctgatgagcatgctcaggaaaggtaatgtcaagacatgtgttacctcgccttaattttcgttccaggaggtgagcatgcatttagaactaaaaggcacaaagactgttggtggtcttgcctgttcaaatataatggagaggagttttcgctacatttaccctctcttgaagtggggttgaaatatagcatcaagttgaatgcttgattaagtttaaaggacttgtgtaactctttttctgtttactgtgattacatgacctggttgattaacataatggtctgtttatctgtagtgtgggtgagttttttgagcgacattttgggaaagaggtaatggtttaccatagtatttctgctttagtggtaaattgtaatgttgctgataattatacttcgctgcagtttgttgattatctaattgatccttttgtcgcgggtacaagtggaggagatcctcagtctctttctgtaagtgaacattttgtgcttcactcccaattttttggaggctggaaatagattcttttccagttgttctgtcaaaaatagatgtagctttattttgaatttgaagttcccaattgttcattttgactattactgattattgctaagagtggcattatgctattatgctcctaaaagaaaggtgaattttgacctacatatagtataatgtatcaatattggtttaattgtttgttcttttgttccttttggtgctcatcttgcgccttgttctcatcgctcgttttttcatgttgcacttgatttaaatttgctcagcttaacttgtctttttgaatttatattacttattgctatattttactaatttcgttgaaactaattttttgctgaacttttcgttttgttgaaatcatttttctgaattaacttgattttcctgaatagaattgaattttggtgatcttaccttttctgcagccttttatttctttcttgtcctttttccaatctcatttttttatatttccattgtgttgacatcttatcattaactgtgcagatgcgtcatgcatttccagaagtatggaatattgagaacaagtatggaccataagacgtttattttaatcgacatgtatgtttcttagtttatacatatattaattctgtggtaaaaaaaccgaacaagaatatctttttttttttctatcatcaaaaagggtgaatatatgtagaggaaaaagatttgaatcaagatattagcctaaagcaataataatgttagtaatagctttaataacaaattcaaaacgtacattaatgaaccgagaggccggaaaatagttaaagtgaccactaagagaagcgaaggattcatgatgggttttcaacccagtagggcaaatttgttcaatgttctttacaaatcaagcttattaccttgtgggtgtttttgctagagatgaatgatagaattttccctagttggaagtcttttttggttactttatgggagctagtgatgtaatttgtttcgccttatggcatttcctaacatgtgcttttgtgatgtattgaagctttttttttgccttaatttatgctggattttaattttgttctttgtttcatttttcttgcttttgaaaaaaatatatagatatgtatatattaggattggtcgaggattttgagggaagggaaagacctaagaaaacttggatgagggtgattgatagtgatatgagtctatttgggatcgaagaaaatattcctttggataaggtgtagtggagggttgagggagcaaatttatgcagattagcttgacttaaagtttttctttttgattatttttcatttacttgtgttttgcaaacatttactcatgaatgatgtaaacttcttcaaccaaatctctggaaaaaaataatctacatggaaaaaacattattaatgttaacttgacagagatcccatccttgtgaagcagctagcaattaggcatctaacaattgacattttaatggacaggatagaatgtctcttgatagtcaataccctctgtttcattgtatcccatagctactaatctagtttgtatctttccaaagaaccattattttgaagtttcaccttgaacacccattttgaaccaatatgtttcttgcccttggggagaggggctaattgccatgttttgatgcggatgcaaagacacttgttctacctgagcctattgacttgatcatggatactctagggtttgaactcaagggaaagaatcaagtcttggcatgtgtggtgacatggcgtggggatggagtaaagaagagtcatagttctgttaggatatgttcttgcttgctacatagaatcgtagttctgttaggattgctatgatattatatctagtagatagattttatagttaattaggataaacatgtgatgatcatgttataataggcatgtgattagaggataggattagcttaattcttatcttgttgttagtttaattcttatcctagttttatgtttatcttagtcgaagttgtagccatataaagggcgttccattcattaataatacttagttttgctttgtgttttaaacatacttcttgattattgtttgcttgtgagctaactaatcaaaccattaaagacttttcaggagttttagtgctaaacatcttaatttcaggagtgattttaagagcgtttagtgatcttgaatcaagaaatatccttgttcttgttcgactaatatcagtggttttgttcgagttcttggagttaatctcttcaagattcttattcaacttgattgttgagcttattggtttagtaatcatatcaagtggtatcagttttccagggaggagaggatagataggattctctttgatcaacaaagatccaagggctatcaacaaggttcaaacattgctgcttgttcaagacttgatctttttctaccaagatgcattctttacgtcacaaggtagtaataacaagattaagagtggtttttacatccaagaatcaatctttcacgtccaagatttcatctttcacgtctaagattcattctttaagatcaagaaagttataacaagcatagaagaacacataaccatggagtccgagatggacaagcttgccaaagctatgcaagcacttgcaaagtcgcaaactgaatcacagagtcgactcaatgagaatactaccacaatcaatgggattggtagtaacatgaataggttggaggcacgcatggatgccattgcaaccatcatacaaaagaagcttgatcggaatagtgccaacttcataggtgccaattcagaggaagagttggcagaacgtgaagaaagatcatccaagactacatacaatgatgatcgtggcttaaagttggatgactataatggagatagcaatcgagaagacttgttacagtggattcgacaacttgagaaggtatgtgattatagaggctttgatgacaagaaaagattcaggattgcctccataagactcacgaaatatgctggaatttggcttgaaagcttcaaggcacaacgagccaagaaaggtaaagaaaagttgtgtagttggacaaagttgaaagttcaagcttaaagagaagttcttgcctagtgactatgaacaaaaatagttcataagactctctactataagccaagacacgcttagtgtacatgagtacaccatggaatttgacaagctagggcttatatttgacatagaggagaaagaacaatggaagattgcaagatacatcaaaggcttgaaccgccacattgccaagaaggtggaagtatccacttatcacacctttgaggatgtgacaaagttggctaagaagtttgaagaacatgagaaggaagagaagcctaagagttcttacacgcctaagtatgatactaatgctaaggccaaggctagcttcctactcaaagtggtatgaaggacctaagaggctaagaacctcaccccacctaaagaagacacaagagttgagaagcctaaagtcgtcgttccaaaggagaaatttgaagagatgagaaagtgcttcaagtgtcaaggaaggagacacatagcaagcaattgtcctaacaaaagagtcctcaccatgagacaatacctagctttgcaagaagaggaggatgtctattagttcgtccctgatgaagagcaaacttaggggaagaagaggaggaggatgcttttgctgaggatgatgcaaggctagtaggggtcaagaggcgcaccttacatgtcgaccatacacctagcatggagcaaatggaaaaatcttttccacactagatgcaaggtaggtgactatatatgtaatggtataatagatagtggttcttgcactaatgttattgtatctgaggtagtgtcaaagctaaacttagctacaagggcacaccctaagccatacaagttgagtttgctagatgatagcactggcatgagagtaaagaaacaagctttgatttcattctctataggggttataaggatgagttatggggtgatgtattgcctatgagtgcatgtcatctcttgcttggaagaccattgcagtttgataaaaaggtcatccatgagggggactctaatgtgtactctgtgttggttggttctaagagggtatgtttgcatcccttagctcctcattcagtggcgccaaagcaaccacctaagacaccaagttactttctatcttcaagggagttcgaacaagaggtggaggaagaaggttgtgcttatgccttgattgtaagacatgctgccacaagtgtcaagactactagcaatgagaagctcgaagccttgatgaaagagtttgaggatgtctttctagaggaactacgacccttgagaggcatagaacatgctgtagaccttgtacctggcgcccctttgcctaacaagcctgcttataagtgtgatccagtggcatctagggaattgcaacgccaaattgaggacctaattgaaaagggctatttaagggagatcatgagtccatgtgttgtgccagctttactagttcctaagaaagatgacacatggaggatgtgcatagatagtagagcagtgaacaacattacagtcaagtaaaggtttcctatgcctagattggaagatatgttggataagttacatggggcatcaatcttttctaagattgatcttcgaagtggctaccaccaaatgaggatcagagaaggtgatgagtggaaaacaacattcaagaccaagcagggattgtatgagtggatggtgatgccatttgccttatgcaatgcgccaagctctttcatgagcttgatgaatgaggtacttcgtccgttccttaacaagtttgtggttgtttacatagatgatatacatatctatagccaaaatgtggaggaacacttgttgaacttgcgtagcttattcatgaagcttagagagcaccaactctatggtaagattgatggcgacgaggttgacgggggattatggcggcagtgaatcaccctctttgccggtcactgaaatacaacctgaggtatctttaaattctgtaattggattgactaacccaaaaactatgaaattgctgggaaaaattgctggatgtgaagttgtggtgatgattgaccctggggcaacccataattttttatcactagctactgttgagaaattagctattcctgtgtcggaatcggaaggatttggggtttctctaggggatggacaggcggtgaggggtagtggaatttgtagaggggtgttattgagtttaaatggtggagttgaagtggaaacagattttcagcctctgggtcttggtaattcggacgtgattttgggtgtacagtggctggagacgttggggacagtggagagcaattggaaaacacaaacaatggggtttgaaatcgagggtgtcaagttcactttgaaggtgacccatcactggcgaggtctcgaatctcactcaaagccatgatacgtaccttatgtaaagagggtggaggtttgtggcttgagttgaaccagattgagcattatcaggagaaaacaccgcattcatcagccttacctgaaattccagttttcttacagagagtccttacccaatttcagtctgtgtttgctacaccagaaggcttaccaccgataagagaacatgaacatgcaatagttcttagagaagggtgtaatccggtaggggtaataccgtaccgttatccacagttccaaaaagatgagatagagcgcctcatcaaagaaatgttggcttccggaatcatcaatccttccacgagccctttctcgagcccggtgatattagtgaagaagaaagatgggtcgtggcggttttgtgtagactatcgggccctcaataaagaaacggtccccgataagtatcccattcccgtgattgatgaattgttggatgagcttcatggggcaacacttttttcaaaactcgacttaagggccgggtatcaccagatccgggttaaggccgaagacactctcaaaacagcttttcgcactcatgaggggcattacgagtttttagtaatgccatttgggttgacaaacgcgccggcaacgtttcaatcccttatgaacgaggtcttcaaaccattcttgcgcaagtttgtcttggtatttttcgacgatatattggtctacagtagttctgccaggaacatgaggagcatttgaccttggtgttgcacaccctagcagctcataaattgtttgtgaatcagaagaaatgtgattttggcaggtcggaagtagcatatatggggcatatcatctctggtcaaggggtggctgtggatatggagaaggttcaagcgatggtggaatggccccttcctaaaaacctccgggaattacggggatttttgggccttacagggtactaccgcaaattcgtacttcactatgctcatatagccaagcctttaactgatcaactcaagagagatgcgtttgggtggtctgaggcagcaactcaagcctttgaaaagctcaagaaggcgatgatcacatcccctgttttggcaatgccggacttccaagagttgtttgtggttgagaccgacgcatccgggtatggtctgggggcagtgttaatgcaaaacaaccgacccattgccttttacagtaagttgttaggtgcccgggctcaattaaagtcgatctacgaaatggagttgatggccatctgcatggcagttcagaattggagatattatctgctgggtcgacatttcctcattcgtacagaccaacagagtttacgtcatctcactcagcagcgagaagtaagtactgccttccaacgttggatgagtaaacttatggggttcgattttgaaatacagtttaagccggggtgtgccaaccgggtagctgatgcattatcccgcaagacagtgggagaggttgaattgggtgcgctgatattaactcatggggtggactggaccgacttggagcgtgaaattgaaggcgatcctctgttgtgcaaaattaaacaagacttccacgggggtgctattactcctgtgcacttttctttggtggacaacaagctgttgttcaagggtcgatacgtgattcccagctcttcggtttttattcctaccttgctgcgagaatatcacgattctcccattggagggcattcgggggacctcaaaacatatctcaggatggctgccgactggtattggaggggcatgcgcaaggatgtggcgcggtatgtgcaacattgtagcgtgtgtcaacaacaaaaaatgtctcaacagatgccagggggggtactacaaccactccccataccttcctcggtttgggatgacttgtcaatggacttcgtggaaggcttgccatcttccaagggggtaaacaccatcctcgtggtggtcgatcgtttgtctaagtacgcccacttcctcccactacgtcatccatttactgctgtgtcggtggcaaatgtgtttgtcaaagaggtggttcgtttgcatgggtttccttcctccattgtttcagatcgggatcgaatttttatgagtgtgttttggcgggaattatttcgtttacatgacaccacactcaaacgaagtaccgcgtatcatcctcaaacggatggtcagtccgaaatcgtcaatcgagctctggagacttatttgcgttgctttgtgggggaatacccgcgctcttgggctcagtggcttgggccgaattttcatataatacttctcctcatctctctaccaaaatgaccccgtcaaggtcctttatggtagagaccctcctactgtgatacgggttaatcggggagcctcacctgttgaaagcttggaaaacatgctccaagagcgagacgcagtattagatgccttgcagattaatctgattaaagctcaacagaaaatgaagagtagtgctgatgctacaagaagagaggtgcattttaaggtgggagatcgagtgtacttaaaattacagccttaccgtcagaaatctttggcttaacgcccttatgagaagttagccgcccgtttctacggaccatttactattttacagaagattgggcaagctgcatacaagttacaacttcctgtttctagcaaggtgcatccggtgtttcatgtctcccaactgaaacaggccgttggttccattcccgtttcagccactattccagagcaattgtcttctgacttggagttagaggtggaacctgatgaactcctcgatgttcgtagtgtttctagaggccagcacacttacttggaagctctcattcagtggcagggattaccatcattcgaagctacctgggaagatgtggctgctttccatcaccattttccatccttccaccttgaggacaaggtgaaactttgggggggtggtaatgtgatgcaccaaactaccactccactactcacctattagaggcgtaagaaaaagggggtaaatcaggaatagtttacaaattctgttgaaaggaatattttgtaattatgatgtcagaggttgttagcaaaaaggcagtagagtaacaataaaaaggggaagggaggagagaagaaggtattgagatttttgtaaggaacttggcccttgggagagttgggagcctctcgaaagctcaccattatcttgtgaatattttccttcctggttatatacaagaaccttcctctgtcaatttcttttctctctaatcttatttcttattctgttttctggttgccattgtttgaagttgcttgttgtgcttgagtaaatacgtgaagtggtgaaacccatctgaattcatcacatctattccaagtggtataatacaagcttgtaatccaaatctaatgagaaatctaagttatgaagaatttcaaaagaactaagtacccttgttttggatgcccaaggatttacttgccgctcaagttaatgctcaacgtgcaagatacaacctctttagtatcccaaggtagtttccataagaattaattgagctcaaatcaagaacaatatttttatgtattaatgtgaacacttcctgaattatattagatatatggtctgaaggttggaagaaagattagcttttaattttaagtttgagatagtttttagaatcgaggaaagattagctcttaacttgtaaactaaggattgctttataagtaaaacattagttatggaactcttaaaattggttttgaacatttctagttaaaaatcccatgtaattctcccaaactagcttaaaatctcacatttcacaagctaaggagagacaaatggcgttctcttgtgaaacaatctaaaattttcattaggctactgttttcaagtatttatatgttagaagtgccgcatataggtacataaaataagtttacaaacacaagtaggaataaggaaaactaaaagagaaacttcagccatacaaaaccggctgaaatcagctactactttctactttctagcttcaaaatctgattgcaagtctcctttaagccaatcaccaatgaaaacctttcctccacatgaagtgtgctcaaatcaagagaagaaacccatcattcgcctatagctacctgggtcagatgaagatacggcaaaaaaaacgctggaaatcagtgaaccaaaataagcaccaattggatgctttctgtccttgctacattttcttctcataggactacttcaagccatacatgaataagcagttagatccagctcctagcatccatttgatcgtacaaatgagctccaaaaagataagtaaaaccaagcagccaaaacctaattaatactaatgatgaattagttgaatagctaatgacgatgaagcaacactttagtaggaatagtgttaattatgatcaatgctacttaatcttctgattaatttttggaaaaatgtcatatctaccttctgtatacacttattcataactatatcgtattattattatttttaaataactaccttttaagtaccaaaacctaagaaatcaggcacttgatggattccatccaaagatccatttggcggggcccactaactgacttttgattttttgcctttcctcttttggttaatctcaatggttcatcaataacaactcaatcttctccccatttcatcaaatcatccctaaatcagaactttttcaaattcacccaaatgaggttatggaaacctctaccaagtttattcgaccacttttagtctagctcaaagttttacacttgcttcaaaaactaagatttattaactttagaaattaggtttttatttttattttttatttaactttgtaacaatcttaaataactcaggtgctttctagagtttggctttaattgtttttcccttggttatgtgaaagaagtatgactactttctccaagactaaagtagagagcaaaaaatgcaattctggaatttcttgcaaaagaaaaggaacgagttaatgataatgaaaaacaaagaaaatgatgagaagagaggagctgaatcaatcatgatcatgtattttaaagttttttttgctattgaagtgacttaagaagaggaaagaggatgagtgaagacaaacaaaagaaaggataaatagagggaaatcttgggcttagaaaggtgaaaaggtaagaagatgagttagtgggccccaacaaatgtatctttggatataatccgtcatgccactgtttggggcttgcttaagtccatacattacttcactaattttacaaaatttattttcttgaccaagaactgaaaaaaccttcagtggtgatctattaggttttggaagttaaaaggtagttatttaaatgtttttaatataaaaggtagttatttagatatttttaatataaaaggtagttatgtgaataaaagtgtatataaaatgtaattttttgacatttttgccttagtttttcttgctaattcaccttttcaacttgaccaagttgctatgaggagaaaacgagcaattattaagcaaatcgcaacactagcattaatccatggcccatgaaactctccataattagagattggattagcacttagtagaacttcttgctcctgctccaggtttccattacttctttatctaagtgcatcaaaaggttgttgggttatgaaaggtggtggttgtgtatagtcattgtcaaaatgttgttaatgcactctatttagaggatgagggattgaatagttttcacctcgtgacctttcattcctttttaaaaaaattgataatgtgtattggtcctatgactgtatgaatggtaataagctatctcatgagctgttactatcttcctcagagtctaggtagaagggtttgggctgataattttctactatgtgcaattagtttgttggatttggatatgctagttgatataggtcctttcccttgggccttctcttaatataggcctacagtgtgattgaagataaatcttctggagaatataagaacaatgagatggattggttagaggttgatttgttcttttggtgtaagactatttcgggttctctattggttatgttcagacgccagaatatgtgttggtgattgttttccatgaacatactttatccgcagagacatttttcttttttcttcctataagattatatttgtttcctctcttggtgctcatctcagtgtctctactttacgttaaactgttgacattacttgacaatgcgtatatttgtcgcatggtgctcttccctcactccacgtcgaccccatacatcaaaaaatgccattaaagaatattcgaactcacaaccttgtgttgaaagaatggaatccctaccaatgactcattaattcattttctctttaagaaataaatgatttcctcacaaacttttaggctttaagagcccaaaagataaaaacataaaataagatagacatcaacgtcaagattagccttaaatgcacaaagcacatgtcaaatgattgataactactcacgagttgcaactctttgggcgttgcctaatattaattggatctcttttaaaaattgttggtggttatggttggtggagaggaccatgtaacttttagctggtcacaactggtaatgattgtcacttttactgcccataaaaaaatttaaactgttgaatatgtttctggcagtggatctgacaaatcctttacaagttggcgtccattttgttttgccatgtgactcaattataatacgtgagttttattatccaccaggtttggctcactaatttccggattaattcaatctaaactgtctccaaagaaggaaaagggtggaggaggaaagccttcttctaatgaaaagacacgcatacgtggttcgttttctttccagggtggaatgcaggtattagcatgtagctttcattctgttaacatttgtggttcttccagacatacatccaatgctttttttttttcttgctataaccataaacattcttgtcatgaacattctttaatactgttgctgagcttagtgtattcgttcattcatgtaatttcctctcttgaggttaaaatggcatacagccttacaacctatatccataatgctccttagagtagaatccctaggttataacatagtaccacttatcaaaataaacatggcacacactgcaggacaagaagtaaatccacctagagaactgagcacctagtagtaaaagcagcgatacattactaataacagtagcagggccataagagtagtaaatgggcctcatttcaacactccccccgtaatggtgagagagaagaagcagtctgaactcccagcttggagagcaaaatagagtgttgctgaacagggagaaccttagtgaaaacatctggcacttgatcttgagatggaacataggtaggctgaataaccccttcttcatttgtattgtccctcaggaaatgacaatctatgtctacatgcttggttttctcatgatgaactagatatgctgctatggcaagagcagcttggttatcacagtagataggagtagcactggactttttaatgcgaagatctttgaggagttgtttgatccacatcacctcacacacagcaagagccatggatctgtactctgcactgaccacaagaaattgcctctttgactttcaagatacggggggagtcaccaaggagcacacaaaaccagatgtagaatttacaacacccatcccattcactatcacaaaatgctgttagttgagcactagacttgttcgccatgagaattcaccctgttggcagcttgaagatgcacattagtggggcagtgcataaatttgcttaaatcatgtatagtgaaggcaatatcaggcattgccttgtaatagtgagataaatgagcttccccatcaatttttgatacacatcaggttgttgaagaggatcaccattgtcagcatagagcttgacatgtgagtccatacgaagcctcaatcgtctgcaatttataaaaccatattcatcaacaagacccatcacatacttctttagagataaaaacgatacttcactacactgatccacttcaatcctcaaaaaatatcttaggccacccatatctttcatgtgaaattggccagcgaagaaactctttgcttcctcaatagttgctaaactattgccagcaagaatgaggtcgtccacatacaccaatatagcactgaaacagtgagagttttgcttgaagaatagagagtagtcacacttggattaagtgaatacattttgctttaaagcagtgttagcttggcaaaccattgcctcaaagcctacttcaagccataaagtgacttaagcagcttgcacaccttagttcatttggtgtcacttctgccatcagtacttagctccccctctccttgaactttgatcctgttacatgtttcactatatcctggtgatagcttcatgtatacactatcctacaattcaccatgcaaaaaagcatttttaacatccatttgtttgcaagaaccaaccctctaaggatgcaacaacaagcatgtggtcatctttgctacaggggtaaaagtctgctcataatctattccatatctctgtctgtcacccatgattacaagccttggcttatgcctattatttgtgccatcagtgctgtattttgttctgatccatccatgtgagggatggctcatttctacaaaatcctagttccgttaggatttgtgttgttttcctaattctagtaggaataggactcctaaaatcctaatcctcctagttctgttaggagtttaaaagttttagtttgattgtaattctagttgtgttagaaatccaaatcctagattcatgtcacgtatggttagaacatggctagtaggataatttgtcttgtgatgtccatagccttggcatttgtggcacctaactttcaatagcttgtcttctgtctccttttctttctccttctttgaggaatcaacgtttttagagctatctaaaccactagcatcaatattaggtttaaaagtgctaaaagatttcgaatagttcttacttgcatacaatttctttttctagtttatgtagcgtcaccagggaacaaaaactcggccgttccgttctggaacggccgctttgtaacggatttcagagaggccgttccgttaaataccgttctagaacggtgatttggaattcacaccaaactcggcgcgatagcgttacgtaacggtgtaacggcgttccagaaccgttacaatcacataacgtccgttatttgaagaagaccagttcttttggtggaggaagaagaagagccaacgcaagatctatagatctgagttaaaatttgaaaataaaacatgtttttttatttaaattaaagcttacagaggatgtagaactcaaattcgagtaaacccctcctttaatttcattaggttactgcaaatcgaaccctaaattgcaaaccctaatttcgaaaaaaccctaatatgcattgggatgcaacgctgcttctccggtcatggcagagaaggtcgacgagtcatcttcggctgcttttagcactgtagctgccggtggttggcttgtttgcaggttagtgcttgctggttttctttctctcataccgatcatcttcttcttttctctcttctctttttcttttttattgtgtgactgccagtcacgtgataattgcaactcataaagtatctctttctctctcttcttttcatccctttttatttttctttcccttttagtttttattccctcacgtggaatcacctaattttcatccttttttatttttttagttacactcttacacagaagtatgttcaaatatcattatagtacctcaaatattgtatttataagagttttggacataatatgatatagaaagtaaaatagaagaaaaataaagtttaaatgtcacttgtgtgatttttttaaaaaaattcacgccgcgacggccgcgaaacgttctatttcccgttacaagccgttcccgcgataacgcgaccgttcccgcgaacgcgaccgcgaccgcgttttttttccttgagcgtcacatcttgcaagcttcttcaaaggtgagttatgtgtacaactccaatttctctccaatcccctccgtcctcatttaggcctccaaggaagctacttaaacattgatcttcaagttcatcaattttccaaagaatggataacttctcgaactcctttatgtaatcttcaacggacatattcccttgtttaagagtagaccattccatgtacaagctttgtttgtagttagaaggaacaaaacgtcctcttaacaactttttaagcttatcccaagtagagattttgggtttattagctttcacacgctgcctctttactccatccaaccaaatagatgcatatttggttaccttaagcacggccaccttgtatttcttttcttttggtgtctcttaatcccaagtagagcttttgcgtgtgaaagctaataaacacaaaatctctacttgggataatcttcttcttgtttccgaaacaactaattcttatggtagttaggaaagcaagaatggtttctaattcaatagggaatatattaattattattagtttaagttaaatagtgcacgaatctaaatagattattcgtctcaaaatctcacttaagtatagatttgtttggacatctgagggaagaagaagagagcgagataaaggagaattatcactcaatgaatccatatcccgagttttcccatttacttctttgaaagcaatatagttcacgaggtcttattatcagtctatggacataagagtaataatttaagggcaaaaactatgactttatgggtttaaactgatacatgttctgttaaactgatagatgttctgtgttaaaccgatactcatatattcctggttaaactgatagatatatgatttaaattgatacccgtctcagtcatgtcttggattgagacggtctgacacaagactttttgtgtattatatatctgattagaataaatttatcctgtttactaattattttatcttctccagacacttgttgacacaatatgcaatcagtttggtaaagatgaactcaaactacagtgcaaggtcctttcattgtcctacagtcataaggggatcccttcttcagaaaattgggtcgtgtcttctgtgtcaaaaaattccattgaagatcaacaatatgatgctgtcatcgttaccgtgagttttactttgcttactgctattgcaccaatctttcttcttttgacacactgataatggcaatgctgttgtggtttgaagccatgttatggggttttagggatatttatggagtctgatctaatatgttattggataaaattcagatctgtaacgtgactcaatgagattgaaaaaaattgaatcaagataatggattggaaaattaggagctaacctagggtctataagcgatccacttggagtctcataccaagcaggtattcgacattttaggtttatattgctgctatggctcatatgggagcctacatagggtctggtgcttattcctttttcttttgtctagttttggggctgcacatttctgttgtgttttgatatggatagccatcacctgcaattgcatggaggctgaactaagttctataggggagcaaacagtatctgttggaaatttattttcatattgtgtttttaaatgctataatccaaaatttgttgttcccctaaaatgcctaaaatacccttatgtaactgctccatctgtcccttaatagacttcccatttctccaatgcatgtttgccaatacacattttgtattgttaatatcaaaaattacatattagtaaaaattataaaagtttgattttcctaatgtacgcaatgagacgaatcaaacaagacgccatatgactatgttttttcttatacttcctatgttttttaataagtgacatgttttccttttagggaaatgtcacaataagtgacacatagctcaaagtagtaaaaatacttctcatttattacatctttgccattatttaattgtttcacctacctactttatccaatactcaaatttgattggttgaacaattggtcccaactttctctagactccttggtattccctttcccccactttctctctgtgtcacttattaaaaaatggaggacgtatattggaaaaaaattggaaggttttcttcacttatgaatagtggtaaaattagagatgggaaggctattttgggatggatggagtaatatttaaatttttaaaataatgtcattgttttagtgatgaaataaaattcaaggctattttttctagtaattatgttatctgtacatcaccacacgtatcgcgtgcatataagactagtttgatgatattccaacactgttcgaaggaagtcaggcatggaaccatgtttgcttccatatgggaaatattttgcttactctccttcaaacatctacctcattatcccagaatgattgatcgaatctaatacaaatatacaattgatcatatgccaccagggaattacatcaaattaaatttttatagaaggggaatcagtcatagcctcatagggaacgaataagtgatactcgccagtttctttcctggttacttttcctcttctcactagccatcctttatgtatgggtatgctgcatcattcctgccactggttgggactcccgtttgaactatggggggatgggaaagctaagccatcatcttcaaattgagtttcttgagaatgtaagacaccatctgtaagatgaatatagtgcactctatagtcaatgtcatgatctttatgggtttatctgctgaaataactgtgatatacccagctctccatttacaaagttttcctacatattaaactcttgcccgcaattctagaacttcattgtagaacttttcctacataagcatcatttgtcttttctgtagtaaaagttagaaagagctttattttagaacattcgtttttagttttctttgttgttgattactccgccacttttaatacttttatgattcaagtatttgacaaaatcatgtaatttaggtcctctgctgcatgcagtctataccctctctctctctctctctctctctctctctgtggttgtgtcttacttgttgagttactaactccagccattacataaagtaggctggcattatgatgagcaaattactcaagaccacatgttagctcctttttcttttctccttattctgaaaggcaaatataggtccatcttggtgcttctcatgtcataagtaagctgaccccctccttttccagggaataggacaataatccaaaagtgagggttttacatgttgggatttgtgaagtttcttattttacttaatagccgagtcagtgttacaatacatagtaccgtgttacaaaatagtatgtaacaccaagcatgtttatgtgcaaaattgtgcaagactttgttgctggcacgccaagggctgttttaatgtagtttacttattcttttaggtttttcagatgacaatcataaagggaattaggagtgtttttattgtagtcaatccctattgtgctacaacgataaaagaaaaaagcacaagactagaaggagaagtaatgtctaggaaagactcctcacctggggttgctagtcacctacacatcttagaaggcatcaaaccaaagcttattcccctcgactgttttcgggagaaaagaagacaaaattgtttctaacttatactttaccagtttcactacagcatcagaaagaagcaaaatatgctcccacaacacggcgaacctagctttccagatgtgataaaccagaccagcaaaatgattattttcactagagctttgagtctattttttcggtttttccccttcttcctggtaatgtcacgccaccaagccatcatctcaattttttgagatttgacgtaatcgctcaaatagctgagtaagacacttcttgctctaaatactaataaaaaagaggtgaatgtgggtctcagccatgttactcaaatcggataaagtgtctactcttattagggtttttgggtgttggactcatccatttttttttgtaaaatgtcaagattttggtttgaaatgagagattcaagtgtcgtgacatgagtcggcacgcaacacttaaacgtgtcgaagtaacagagggtctcagacaatcaactttaatcaatcacgaaccccaaaatttatgcaacctttgctcatattcagtctctgtaaagcactcaactgcagcacacccacccattcgcttcacctacagcaggagggcacccaagtaattgctatgatgagcgaattattctgttttgccttgctggaatattgctgttagatttgctgactcactggcagttaattatagtcagagaatgagaaatatcctgtagagagagaaagggtatcttttgtatttagctctataaatagctaaggaagggaagggcattgagagtttatgatattataataggagagatttagcctctcgaatgctgataggagcgtagctcttgttggattatcaatactactctgtttgctctatctatttctactcaggttccttcttgtacagtggatccctgattggatttacttcatcaaccagcagataaaattatttgtaggcacattgaaaccattccaaacctaatgaggccaaagtttatcacaaagaatataggagccaaatgtaggcaacagataagagtataattgccagaagttgaagactccaggtattgttcagaaaccttaatgcatatcatcattctgacactagattttccccggagccaactaacaaaaatgaattaaagagattaaggctatgtttagttcacctgaaattttctgatctgaacttatctgatctgatctgaacttattttttctgatctgatctgatctgatctgaaccaatctgattacaagatcttatcttttagatttttctcaatatataagaaaaaatatagtcatgtggggtcttgtttgattcgtctcaatgagtactttattaatattcaattattataatttttactaatatgtaatgaaagatataatgatttttaaatataagcatgatctgaactgatctgatgtgaacttattttttctgatctgatctgatctgattagatctgaaataagcaaaaataaggtgaactgaacatagcctaagcaacaattgagggaaaataagatcattatggctaagataagataaatatgtaatgataaaatcagagtaattatatcagttacactctcaacattcgtcagattgaggtttcctcccaaaatgccaacccacttttctgtattttcacgtccttctctctacccttctaggtatatattacatcagctgtaaaatttttgaaccaactagtagaatactgatctaccctcaactgcctcactttctcattttttctgggcctttttctctctagcacaagtccacataagtgatgcatagcagaaatataattccactagtcatcctcaatattgatataacaaacacatcacccacatattatcatttttaatcgctgcatgcgaggcatacttacccaccaatcaggatatgcataacagcgttcctaattccaaaaccaccatatatcttgggtttgcaactctcatccctagcaacaaggggactttctgaaaaagtggcagattccgcccacaagtagtttgtacggacacctttattatattattaatatcatatttcggcaacacaaattaccagcccagtaaaacatgaattgacatgagactaacaaggggcccaatctaatatcgtacgtctgtactaagcaatgtataaaaaaaagctcaaggtgcattgatgcaatagggatcctaatgtgcataggtgcgcctcattgaagtgaggcaccactaaggataaataaaaaagattgatgtaaaattaaattgtgcaccttgggtgcgcctcgatgaactttttttgtgtgcctaagtgtacctcaagtacgcctcattgatatcgcctcgcctggcagaaaacgagcttgaccccaatcgccttgctccccaccgcctaggcgtgcctcagtcacactttttaaatacattggtattaagtactcagaatggcaaaaagaaactttgggcattaattagacatttcactttttgtgcaactatttgtgacttcagagattgatatgttttctacattacagacttttgtgatggctgcatggtctccactgtcaaagaacattagtttaagtagaagaaatattgctctattaccttcctccctctacaaacaaaatcctaaaatgtggttatgtagtgccaattcaaacttgtagatgcatgactaatgctttcattatgctgtgggtttttatactatgattcatgtccaattacataacaattagctggagtcaggatatgtcacggaaattttaagcctggcaggatgattgtttatattttctctttttcggtgtttaagtcaaagtaaacttctaggctgctcttttataggctagttgggctgttggggagatctacacattaagtgtgaagaaatcttgtctaactccagtttggttgagaactgtaagctgtcataacatttgttgcatgatgaggccttgtgggattatcatgttagctgtaaactctaaacttacttgaaatctagtgttgtgtctccttatttctgtagtcaaaattgaaccttctgtacgtttttgatacctgcgactagaatgatggaattctgaattactgatactattacaaccatctgctaagaacgaagatgactcttagctaatttctcagcagatttagagaaattaagaagaattactaatgaatatttaaagagaaaactaccaagatatgattgtattgatgaaaaacaccaattacaacctaaccaacattcgagaggttggagctctcccaagtaaccatttctctcactaaacttatcaattttcaagatgccttttccattctcagttcctctatatttatactactccccttagcaaactacccaacttattccccaagtaaactaaagagataatatctaaaatacccttccccctacaataatattagttcttagcattaccggccccctaaacttccaccttgtcctcaaggtgggtcgtaatcatcactaaattctgggcctctactcgtatattcagtgtcttgcagcccttcaggccccaagcctaggttatgcagctcgtgttgcggctcctcctcatatagttctctggctggagtgagtgcctcaactataatgaaaaagtcctggaggtggggaaggaaggagtgtctgaaatggtgtggtgtgctgctggtgttatgggcttgtgcctgaaagttttgggtttaaagagatggagtggagaagagtggagaagtgactggagacgtaaaagaaggaatcataatttttgtaagtggtgggttgaaaaagttggtgggaagaattgtttttataaaatgtagtgtaatggtcgaaaaatgggtggagtaagtatggtttttggctggggatgtggtactgggttgaaaataaataggtctgagcttacttgtaaaattggcctcaacatgagcaggcccaatatcttgagccaattccccaaaagctggcaatagagcactcttaattgcattgttgtgggccatcgggctccaaacatatattcggaggagccggacttctttggtgatgtcattagcttggcccattgcacactttcccttaacagcctcaagatcttttcccacttttgtaccccaaccacgtggcttcaccatcctttctttcttgcttttgtcacttttttggcaatatacgagtttgtccttactaccctcatcttctaatgttggcttcctcaccaagcttaatttctggaattttgtccaccaaatcccaccacccatcgtcaacaccatacctatctacaccggccaagaagcctggtcctccacccgaattttcgccacagacaaagcctgaacaaccgtcagttctctcaccggagaagttcacaggtccaccacctgacccactagttgctgatccacccttcacaaatctccctcctctggctgccacaagtagtggttcctccgtaatactcatatttctcgtccaagagccctggaccaccaccggacccacttccaccggcaccaacttgttcaaatgatacttctctttcttttccaaacagcctacttggactggaaaaaccactgcgattgtagcctccgccagatctgtagcctagtgcacctaacgtgcttccaactgcaacccaatagggatggaaatggatgggattcggggagggtggagcatcacccgcatccgtcacccgcatccattcgctccacccgctccacccgcatccatccatccgtcacccacgggtgaaacgggtgggtcggtgataaacgggtggaaccatttagggggtgtttggtatcatgtttttttacaaaagaaacagaatcaagtaacaaaatccgtttctacttgtttggttctatgttgctcagactcgagtacccatgtccgacacgggtacgtgtccaagtgtccaactcagctattttctagaattttttatattttttaacccaaaacaaagtgtccaagtgtcccacccatgtccgactcccgaggatccgacacgggtacttgaggtgaaatgaagagtccgagcaacggaggtttggttagtgtgtaaagtaacaattaccgttacttgaggaaaacacatccccccaagttgtttccattcaaaaacctaaggaaacaaataacgtttcactcctcaaacaagaggaaagggaatgggttatatttatttccattccattaggataccaaacaactaataagggtaacacttattattatcctttcccctccttatcaaaatcctttccattccgtttacggtattcataccaaacacccccttagtatattttctaatgaaatttgtgatatgatatgcatgatataaaataattctatcaaaaatataaaaagtaagtaaacttacatgtacaacttaatagatgggtgatgggttggaggttaaacgagtgatggatcgggtgacgggtgaagaaattctcacccaccactcgctttccatccatttaaattaggtttttcatccatttaaaaaaccgggttaaacaggtgatgtatgatccatcacccatttccatcctcaaacacatcccgatttgtttactgcaccaccagatccaccagtataaccacccgaaaaatcatcatgccttctactagccttgtaacctgctcccggtgagaagcttcttccacaagtggtggtcgctggacctccatctccttcttccccaaaaaattttccatgacacccactcgacccttcatctgtgacaacctcttcttcgtccacctctgaagttttggggtcgtcttcctcctcaagctcctcttgaagtaactttaacttccgttggatgggagagaacgcttcattgattatcttcaccagatcttcttgaagtttctcgaaactttttctcacgttttcctctacctctttcgtgatttcctttccgatctccttcatttttagactaggagctcttgcgattccatggcagatttctttttttaaaacaagaaaatcaggcacttaatctcccagaatagtggtgctctgataccattttctaagaaccaagatgactcttagctaatttctcagcataacaacaaatttagagaaattaagaagaattactaatgaatatttaaagagaaaactactaagatatgattgtattgatgaaaaacaccgattacaacctaaccaagaggttggagctctcccaagtaaccatttctctcactaaacttatcaattttcaagatgccgtttactactccccttagcaaactacccaacttattccccaataaactaaagagataatatctaaaatacccttccccctacaatattagttcttagcaccatcaaactgggatggatggttttgtaaggttccaatttacttctccatcaaaatattttaggattttttatctcatgtattttagagtttcctcgtccctttttatctgataagattcttctgatgatttgattttatggtaggctccaatcagcaatattaaagaactgaagattctgaaagctggagttccattttcacttgacttcattccagaggtttgtatttttatagtggttagacatgcttcccctagttttcaaagtaaaagcatccttgttgtgacgatattttttcccttgtttttgtttttattattatcatcacttatttccattttctattttccatgctgataagatgttcatcaccataatcttgtggtatcagaagtgtttagtggagtttattcactacacatgcagttgttcttttgccatgaccgccattcattttctcgtcaaaacaaatctatgaagtttggttttcagactcatggttcttgtagctcttgtgaatttttttttcttctccttgcatgcattcttcaaattacatattgcatataccaggtgctctcctttattttatatttaatttttaaaattctatcatatattttttaatgtcaaacctcaaactaggggttcactgcatcttaggcttaccaggctaatatttctttacttaaccttttccctttatatttgctatcctcttgtgtagtaatcaccataagaagggtacaaactaaattaccctcccattcttttgtatcattctgaaatagtgtcacagagctttgatttttttgccctcatttaatctggcaaatgttctctctatttttttttttttactttcttttgacgggattctcaggcaattgttacggggagcagccagtcacactgtttctgtttattatgcaggtgagttacctgcccctctctgttatgattactgcgtttaagaagaccagcgttacaagacctcttgagggcttcggagttcttatcccttcgaatgagcaacataatggactgaagactctcggtaattgtctggttcacgtgtgtagcgaatcagattctcaatccttgatttcgtaacattgcagctactctgttttcatctatgatgtttccagatcgtgctttctccgatatgtatctctatactacctttgttggaggaagcagaaatagagaacttgcaaaagcttcaacgtatgagatatgcaatgttttaaatgtatgctatagtcatcgtttcaaccttttggtgcctttttcttactaatttatcctcctggtttaatgatcttagggatgaattggagcaaatagtttcgtctgatctccaccagctgttgggcactgagggaaaacctacttttgtgaagtattgatatctttcacccaacttaacatgatttgtgcttataatatgttaaataaagtaactgaaatcctgaaattaagactacgaaactgtatggtgacagtcatttttactggaacaatgcattccctttatatgggcacaattacgactcagttctgagagcaatagaaaagatggaaagagatcttcctggacttttttacgcaggtaatctgtcatttgcttgttgcgataaagttcatgtacagttggcatatcaatcaacttgcattctttcttgctaactccaaacaatcaggatcattaacttgtaggctgcagcaacagagagtatctcccaagttgttaggtttcatgtaacctcgtcgctgagatgaaatttccgttggctaaaaagtgaaagttttgtattgatgttacccaaaacaaaagtattttgcatgttgcttgaagttttggttgtttcagatagtacatcctttgacatgaaaataaatggaaaagcgtatgtcaagcaattatcatctagtttctttgtttctagatactagccgcatttgatcccagatcatttttgaggaagtcagctgaaataccgtagctatccttcagttttcataataaaactttaatggatctgatgtacagtaatttagtgtgcaccgggttaataattgatattaacttcatatagtgagtcttataaagatataatgaacttatatacaatatagtggattttattaatggaaaacatatagtgaaactatatgcaatatagtatgatacataaagacttagacaacaagagcattcgaaattacaaagaacaaaggaaagaacaattgtatcaaaccggttcgaatgaacaaacaaccaccacttccacaatcaatgtaccaccaatcaagactaaactataacaatgagcttctagtttaagtctactttgagttttaatcaccaattcaacgattagatgatcaaaattgcaaaggttaagagttggtcaaacctaaccaagagttacactaggcacatagctttgttaggagtatattagtttatgaattctagttaagttagaaatccaatacctagttggattaggattcctaattggattagaattatagtttagttagaattctagtaatagtaggcgtgtgattaggagatataattagcttaattcttatattgttagtttaattcttatcctcgttttaggtttatctttagtcgaacttgtaccctatataaggggcctttatttcattaataatatagtttattttgagtttaaacctttacttgtgattgtttgcttgagaggttattaatcgaaccattaataacttttcaggattgttaagtttttagtgttaaacatcttaatttcaggagtgattttaagagtgtttagattcttgtattcaagtttcaggactgatcttgaatcaagaaatatccctagtttcgactaatatcataagtagttcgaattcttggagtcttttcttcaagattcatattcataacttgattatttagacttcttggttttgtaatcatatcaagtggtatcagttttccagggaggagaggatacaaagggttctctttgatcaaagaagatccaagggcatcaataagaatgacacttgcaataagttcgagtgatacaaacaacttcaagactcgatcttttgctaccaagaaccaatcttgacgcctgaagattgttaggacaaaggataagaagtgtttctacatccaagattgcattctttacgtccaagattgcgtcaagatccattctttaagttcaagaaaggagtagaaagcattcgaacactacttaaacatgacatccgagatggataagctggctatggccatgagtgccttggcacaatcacaaactgagtcacgcaaccacatgggtaggatggaggcacgtgaccgtggattgaaactagatgactatagtggagatggcaatccagaagacttgttggagtggatttgccaactaggcaaagtgagtgattataggggctttgatcacaagaagagattcaaggttgcttccattaggctcacgaagtatgctggaatacggctcgaaggattgcatgcacaaacttcttgcctaatgactatgaacaaaaacagttcataaggctcgcatcaataagccaaaacacacttagtgtacacgaatacagcatggagtttgacaaattagggcttatatgtgacatagaagagaaagagcaatacaagattgcaatgtacattaaagggttgaatcgatatatagccaagaagatcgaagtctcaacttatcacttctttgaggatgtgactaaattggctaagaaattcgaagagcatgacaaagaagaagggcctaagagttcttacacacctaagtatgactctagtgctaaagggaaatcaacagttccctactcaaggtggtcggaaagacctaagaaccccactacacctaaggaggacactagcatggagaagacaaaagtggccgtacctaaggagagtttaattttgtgttttatacatctttgcttaagagcttaacaattgaaactattaataacttttcaggatggttaagtttttagtgttaaacatcttaatttcaggagtgattttaagagtatttagattcttgtattcaagtttcaggagtgatcttgaatcaagaaatatccccttgttcaactattataattgatcttattcgagttcttggagttaatttcttcaagattcatattcatacttgattattagacttcttggtttagtaatcatatcaatatcattagcattaatttacccccagggagattaagaaaggattagcctaatcaaggcgcttaagaagtttttaggaaaaatcgtgcttgttaagcttaagaattgaacttctttcaccatttgcccttgattctcttgttgaactagaagatcttggttcatagtagatgctcctgcatcatagtagagcatttaattttaattttttaacatgcacgaagatgtaggtagtgtagtatatatcgtgagacgtggtttaacatatagaaagatgtagtttctgcatgatatagtgagtttttgcatgatatagtgaatgtctgaatgatacagtggatcgttccgaattgttgtagtttgtatgatatagtatttttgtgaatgatatagtgagtttcttcatgatacaatgggtttctgaatgatatagtggattgcttagaaatgatatagtgagcttttgtatcatgtagtaggtttctatgtgatataggttgttaaaagatgatacatgcttttggcctcatgtactctaatgttaacgtgaacccggtccttgcaagtcaattgcagttttttcaatattaagctatttttttttttttttttttttttttttttttttttttgtacgggaatatttagcatctttaccacaaacataaccatacgaatattatgcggaaattccagtctgaagtcttaacttttcaaaattaaaagcttctatattatttttggaatgaaaaaaaatgagctatggcatgttattttgaaatacaatgagtctcaaggtgcatagtggcttcaattctacgaataatgaatggactactgatttctaattttttgttccgggcttttgcattaggtaaccataaagatggactctctgtgggaagaactatttcctctggatacaaagctgcggagcttgtgatatcctatctcaactctacttaagatgcctaaatgatcgaggagactccgtaagtcctttctctgattctatctttgaactgagtggaaacacgactgtggtctaaagtagttgatgtctcagatatccagaaatggcgttagtgatattcaggagctgtccattgaccctttgattcattgttgcagtttactgaaagttgttagctggtctcagaaaaacgaaaggaaaaaagggggaaaacaaaaacaaagaaacgtagattgtggtgttaaaatcaagaattccagagatttgtaccttctttatcagttgaattgtttacagtgtgaatcaagaagttagctcgaccttcttttcttgtgaatggtaagatttcgtgatcatcaatacttgattgtgctgtttgcaacttcaacggtaagatttcctgatcttacagtttaattgcttgtgctgtttgccactt

SEQ ID NO: 107 - DNA, 37009 bp, synthetic construct
  source 1..37009: mol_type = other DNA
tattccatcgaatgtagcaaattgactgtccgttgcaatttcggagtttccactcgtcgcatggtaaatggtaatgctatacgattctcacctctcaggagtctcaactcatcttcaactatcgcaggcatttcccaggaagaacccattaatggccaaagtgtctgagccgggtaaacccagtaagtcaaacattcgaatcacaactcaagcaaatttgtcttgtttgcgttatattttgctcatttcagccttttttgtttttccgacctttgcatactgaatattgtgtgtgtgtgtgtgtggggtttcagcttctgctaaaaggattgctgttgttggtgctggtgttaggtaaattttcgtctcttgcagagtttttgagtcatttgggaattctatgtgaaacttgtaactcccttcagtccaacgaacgcagtacaattttctatcaaatcatggtcctaatttccaattttccatatatattgttggaattatattgggattgtctatcactattaatagtattaggatcaattgtagagaagcacagaaatttttgggatcgaaagaatatctggattgccacattaacagcagatataattcttccaattggtttttggttcttcctaccttgacttgtctggtcaaacattataaactttaacctttaatatccattaaagtaaactataggatttttttgtctaaaacatgcttatataacatgaaatttgtgagaaaccaccttatatatatttttttgcgaaaacaaaccttaaacaaaattattatcgtgagaacaaaccttatgccaatttcgatcattgacccaaggttttggcattgaccgtgtcatgaattttgttgggtttaaaaagtcatgtgtcttgcatacgaaatggtaaatgcgggaaccttgggtcaatgtttggaatccgcataaggtttgttctcccaaaaaatgtttttgttcaaggtttgtttttgcaaaaaaacttatataaggtgctttctcagaaatttcatgttttataaagtagtatttgacaaaaaaccctaaaatatattatagaattattattgactaaattgtgtaaaaatgtactcttctaaaagtacattatagtattttagtggaacatttgcgagaaactactttataaatacgatttttgcgagaaatttcctaataaaaaaatgtgaagtgcaaaactatcttattgataattttctactccctcaaatccaaaatactatgaagtctttcctttctggtttgtcccagattagtttgtacgcttccatctttggtatgatcccacttttattatacttattagttttacgtgagttccttactctatctcttttaacaaaaatactcaactatctctatccaataaaaagttccttactagtcctatcacatctgctttttaataaaataacgtttgataaccacacaacttatatccttaaaatacacgttcaaccaagtgttgagattaatttggacggagggaataaatattttttgaggcatattggtagcagtattcggattccgataggttgactatgtttccaatgttgaccaacacttgccttgcatgtaattctaactttgctcttttttattcttcatttccctcgtattccatatacaatgtttagagacccattccttcctcttctcttctttcccttccttactatgctttgccataatcttcctcaaatgagtgcaaattaatttgtcgttgatgtaggccaactgattgtagcacatcttcatagttcatacctcaacacactcgtaattatattataccctacatgttaaatggctcatgaagctttattttatatcatacttcctccgtttcacaataagtgtaacacttttcttatttggaataatcacaataagtgaaaccaagctccaaatggtaagaaaagttcactcttattacaaatataccaccaaaaagtaagaggggatcacaacttcaatacttcttcactctactttattgtggtcccaactttctctctctaaattccttggtaactccccactttctctatgtttcacttatggtgaaatggaggaagtattttgtagtggtatttagctactaggccttggatgatatacaatcatacaatgtatttatattcacgataatttgctgcccaccttgattaccatgatttccaccaattttatcaatttcagtacttcaccaccccgaatttatattttttatttccaaccttggtatctccatttgtctgagtgcccgatccatttgtatcgcctccagaattgaagaagcttcctgcagctagacaattaggaaggttaaaaaagtttggagatggtggaggatagccataataatcattgttgggaggtggaacttggaaggttattgtagggttgaagtccttgatgaagaagaattgagttcaaatgagaggaaaaaggagcagggaagagggacaataagaaaaaaaagggtaaactaaaatcacgtgtaaggcatgtgcagatcaacatcagaaagcatagtcaacctactggtattagggcactgatacctttttgggtcaaaatttttttacaaggtatttcatgaggtagttttgtccatttttttttttacaaggtatcgtctcattttttttttatcatttagtttctcgcaataagtgtatttcatgaggtagttttttccaaaatttcctcatttattataaaatacctcatcttttccataaataatgcaatgtctagacttttacgctgtttacacatgctcctttgaccatctattgacacacaaggaaaaatagagtagagtcatgcaggatcttgttagatttttctcgatatatactttcaaaagatcaatttttttataattttttttttgaggggattttttttttataattatgtacttatcaaaggtcaaagttgtgcaccgggaagcataaaactctatgtgttgcaatttacatggaaggggaggagtataataagagaaaattatggtaaaaggttcattcctggagatcatgagaaaggaagtagaaagaacaaaaaagaacaatgggagtgcttttcaatgtttgttgtacgtagcatttattcatttgctataatgttttgtgacattgtagtggacttgctgccgcatataagctaaagtcccatggcttgagtgtgacattgtttgaagctgatactagagctggaggaaaactcaaaactgttgcaaaggatggtttgatttgggatgagggggcaaatactatggtaatgtttttgattattgcaggtcttgcactttagcgcacaattaatttctggatttttttttgtactgtggtggttatggtcatcaacatgtctcacccactgtgcttgcagatagagagtgaagcggaggtcacgagtttactcgatgatcttgggcttcgtgagaagcagcagtttgtaagtctttcattatctgaatggcacatactttatttcgaaagattgtaattgccttttctttctagatggcttcatcttcatgttgctttctgattcagtttcgtggctaactttccaagtttgtctgattgctaactctgtcatagccaattgcacaaaacaaaagatacattgcgagagacggtcgtcctgtgctggtaagtttgcttgttttacttttgacctcttttaagatctttcaactctggagcctggaaacatggtgatgcaggaggcaagttctctctattttacatcctttcttctctgtatcttatgacatttgcctcttattctgtgcagataccttcgagtcccattgcacttctcaagagcaatatcctttcagcgcaatctaaggtcgttttatgttaagacatacttgatgctgagagtttattgaattcttaaccttcttcttattttttttttatttttttagcaaaaggtaagtatattgcatttaccaaaaaacagtatgtacaccaccacagcagccatgtcagaatctagaaataccaccgaaaaaatcctacacccaaccagagacagttatattatatcctactcctaagtttctgtacccaatttacatcaatattggtccatttacaagatatttttataattcacagaagcacatcagttttaattagtttaataatgacctctggatgaataaccaactcagaccatatagccttattcctggctttccggaagttgtacgccagagcagcaagcacagcaatgcaaacctgtttcttatacctccttttatgtgtcttagcccatctcttatagctagtgaagatacagtcgtgtgcacaggattgaaccccaatccaactagcgaaagcctcacaacattatgactataaatacatctgaagtataaatgctgcacctttttctcctcttgcctgcacggtatcagaacaaatcccagctttagctaacaattccctggttttcagtttattcaatgccatcatgcaagcaatgaaagaatgttttggaacattcagtttgttccaaacacagtgagagcaagggacctttcctgcagttccacttagccacttatatccctgactaatagtatgactctttgcaccgtaaattgatttcaacttaactttttcataagcagtgaattgtgtgttgttagagtgtctagctgtctaggagattgggagaaaaggagggaccaaggagatagaaacacacctttgtgtttctttgtgtatttactttttagggtgggtcacgttttctgagaaatttgggaaaaggaagaaatagtaacacactttcccatttgtataacctgtatactggagctccaatataatttgcatttttttttgagctgcaagaatatgttgacaaacagttattgcttcttcctcagctacaacttatgttggagccattcctttggagaaaacgctatgcttctaagatttctgatgagcatgctcaggaaaggtaatgtcaagacatgtgttacctcgccttaattttcgttccaggaggtgagcatgcatttagaactaaaaggcacaaagactgttggtggtcttgcctgttcaaatataatggagaggagttttcgctacatttaccctctcttgaagtggggttgaaatatagcatcaagttgaatgcttgattaagtttaaaggacttgtgtaactctttttctgtttactgtgattacatgacctggttgattaacataatggtctgtttatctgtagtgtgggtgagttttttgagcgacattttgggaaagaggtaatggtttaccatagtatttctgctttagtggtaaattgtaatgttgctgataattatacttcgctgcagtttgttgattatctaattgatccttttgtcgcgggtacaagtggaggagatcctcagtctctttctgtaagtgaacattttgtgcttcactcccaattttttggaggctggaaatagattcttttccagttgttctgtcaaaaatagatgtagctttattttgaatttgaagttcccaattgttcattttgactattactgattattgctaagagtggcattatgctattatgctcctaaaagaaaggtgaattttgacctacatatagtataatgtatcaatattggtttaattgtttgttcttttgttccttttggtgctcatcttgcgccttgttctcatcgctcgttttttcatgttgcacttgatttaaatttgctcagcttaacttgtctttttgaatttatattacttattgctatattttactaatttcgttgaaactaattttttgctgaacttttcgttttgttgaaatcatttttctgaattaacttgattttcctgaatagaattgaattttggtgatcttaccttttctgcagccttttatttctttcttgtcctttttccaatctcatttttttatatttccattgtgttgacatcttatcattaactgtgcagatgcgtcatgcatttccagaagtatggaatattgagaacaagtatggaccataagacgtttattttaatcgacatgtatgtttcttagtttatacatatattaattctgtggtaaaaaaaccgaacaagaatatctttttttttttctatcatcaaaaagggtgaatatatgtagaggaaaaagatttgaatcaagatattagcctaaagcaataataatgttagtaatagctttaataacaaattcaaaacgtacattaatgaaccgagaggccggaaaatagttaaagtgaccactaagagaagcgaaggattcatgatgggttttcaacccagtagggcaaatttgttcaatgttctttacaaatcaagcttattaccttgtgggtgtttttgctagagatgaatgatagaattttccctagttggaagtcttttttggttactttatgggagctagtgatgtaatttgtttcgccttatggcatttcctaacatgtgcttttgtgatgtattgaagctttttttttgccttaatttatgctggattttaattttgttctttgtttcatttttcttgcttttgaaaaaaatatatagatatgtatatattaggattggtcgaggattttgagggaagggaaagacctaagaaaacttggatgagggtgattgatagtgatatgagtctatttgggatcgaagaaaatattcctttggataaggtgtagtggagggttgagggagcaaatttatgcagattagcttgacttaaagtttttctttttgattatttttcatttacttgtgttttgcaaacatttactcatgaatgatgtaaacttcttcaaccaaatctctggaaaaaaataatctacatggaaaaaacattattaatgttaacttgacagagatcccatccttgtgaagcagctagcaattaggcatctaacaattgacattttaatggacaggatagaatgtctcttgatagtcaataccctctgtttcattgtatcccatagctactaatctagtttgtatctttccaaagaaccattattttgaagtttcaccttgaacacccattttgaaccaatatgtttcttgcccttggggagaggggctaattgccatgttttgatgcggatgcaaagacacttgttctacctgagcctattgacttgatcatggatactctagggtttgaactcaagggaaagaatcaagtcttggcatgtgtggtgacatggcgtggggatggagtaaagaagagtcatagttctgttaggatatgttcttgcttgctacatagaatcgtagttctgttaggattgctatgatattatatctagtagatagattttatagttaattaggataaacatgtgatgatcatgttataataggcatgtgattagaggataggattagcttaattcttatcttgttgttagtttaattcttatcctagttttatgtttatcttagtcgaagttgtagccatataaagggcgttccattcattaataatacttagttttgctttgtgttttaaacatacttcttgattattgtttgcttgtgagctaactaatcaaaccattaaagacttttcaggagttttagtgctaaacatcttaatttcaggagtgattttaagagcgtttagtgatcttgaatcaagaaatatccttgttcttgttcgactaatatcagtggttttgttcgagttcttggagttaatctcttcaagattcttattcaacttgattgttgagcttattggtttagtaatcatatcaagtggtatcagttttccagggaggagaggatagataggattctctttgatcaacaaagatccaagggctatcaacaaggttcaaacattgctgcttgttcaagacttgatctttttctaccaagatgcattctttacgtcacaaggtagtaataacaagattaagagtggtttttacatccaagaatcaatctttcacgtccaagatttcatctttcacgtctaagattcattctttaagatcaagaaagttataacaagcatagaagaacacataaccatggagtccgagatggacaagcttgccaaagctatgcaagcacttgcaaagtcgcaaactgaatcacagagtcgactcaatgagaatactaccacaatcaatgggattggtagtaacatgaataggttggaggcacgcatggatgccattgcaaccatcatacaaaagaagcttgatcggaatagtgccaacttcataggtgccaattcagaggaagagttggcagaacgtgaagaaagatcatccaagactacatacaatgatgatcgtggcttaaagttggatgactataatggagatagcaatcgagaagacttgttacagtggattcgacaacttgagaaggtatgtgattatagaggctttgatgacaagaaaagattcaggattgcctccataagactcacgaaatatgctggaatttggcttgaaagcttcaaggcacaacgagccaagaaaggtaaagaaaagttgtgtagttggacaaagttgaaagttcaagcttaaagagaagttcttgcctagtgactatgaacaaaaatagttcataagactctctactataagccaagacacgcttagtgtacatgagtacaccatggaatttgacaagctagggcttatatttgacatagaggagaaagaacaatggaagattgcaagatacatcaaaggcttgaaccgccacattgccaagaaggtggaagtatccacttatcacacctttgaggatgtgacaaagttggctaagaagtttgaagaacatgagaaggaagagaagcctaagagttcttacacgcctaagtatgatactaatgctaaggccaaggctagcttcctactcaaagtggtatgaaggacctaagaggctaagaacctcaccccacctaaagaagacacaagagttgagaagcctaaagtcgtcgttccaaaggagaaatttgaagagatgagaaagtgcttcaagtgtcaaggaaggagacacatagcaagcaattgtcctaacaaaagagtcctcaccatgagacaatacctagctttgcaagaagaggaggatgtctattagttcgtccctgatgaagagcaaacttaggggaagaagaggaggaggatgcttttgctgaggatgatgcaaggctagtaggggtcaagaggcgcaccttacatgtcgaccatacacctagcatggagcaaatggaaaaatcttttccacactagatgcaaggtaggtgactatatatgtaatggtataatagatagtggttcttgcactaatgttattgtatctgaggtagtgtcaaagctaaacttagctacaagggcacaccctaagccatacaagttgagtttgctagatgatagcactggcatgagagtaaagaaacaagctttgatttcattctctataggggttataaggatgagttatggggtgatgtattgcctatgagtgcatgtcatctcttgcttggaagaccattgcagtttgataaaaaggtcatccatgagggggactctaatgtgtactctgtgttggttggttctaagagggtatgtttgcatcccttagctcctcattcagtggcgccaaagcaaccacctaagacaccaagttactttctatcttcaagggagttcgaacaagaggtggaggaagaaggttgtgcttatgccttgattgtaagacatgctgccacaagtgtcaagactactagcaatgagaagctcgaagccttgatgaaagagtttgaggatgtctttctagaggaactacgacccttgagaggcatagaacatgctgtagaccttgtacctggcgcccctttgcctaacaagcctgcttataagtgtgatccagtggcatctagggaattgcaacgccaaattgaggacctaattgaaaagggctatttaagggagatcatgagtccatgtgttgtgccagctttactagttcctaagaaagatgacacatggaggatgtgcatagatagtagagcagtgaacaacattacagtcaagtaaaggtttcctatgcctagattggaagatatgttggataagttacatggggcatcaatcttttctaagattgatcttcgaagtggctaccaccaaatgaggatcagagaaggtgatgagtggaaaacaacattcaagaccaagcagggattgtatgagtggatggtgatgccatttgccttatgcaatgcgccaagctctttcatgagcttgatgaatgaggtacttcgtccgttccttaacaagtttgtggttgtttacatagatgatatacatatctatagccaaaatgtggaggaacacttgttgaacttgcgtagcttattcatgaagcttagagagcaccaactctatggtaagattgatggcgacgaggttgacgggggattatggcggcagtgaatcaccctctttgccggtcactgaaatacaacctgaggtatctttaaattctgtaattggattgactaacccaaaaactatgaaattgctgggaaaaattgctggatgtgaagttgtggtgatgattgaccctggggcaacccataattttttatcactagctactgttgagaaattagctattcctgtgtcggaatcggaaggatttggggtttctctaggggatggacaggcggtgaggggtagtggaatttgtagaggggtgttattgagtttaaatggtggagttgaagtggaaacagattttcagcctctgggtcttggtaattcggacgtgattttgggtgtacagtggctggagacgttggggacagtggagagcaattggaaaacacaaacaatggggtttgaaatcgagggtgtcaagttcactttgaaggtgacccatcactggcgaggtctcgaatctcactcaaagccatgatacgtaccttatgtaaagagggtggaggtttgtggcttgagttgaaccagattgagcattatcaggagaaaacaccgcattcatcagccttacctgaaattccagttttcttacagagagtccttacccaatttcagtctgtgtttgctacaccagaaggcttaccaccgataagagaacatgaacatgcaatagttcttagagaagggtgtaatccggtaggggtaataccgtaccgttatccacagttccaaaaagatgagatagagcgcctcatcaaagaaatgttggcttccggaatcatcaatccttccacgagccctttctcgagcccggtgatattagtgaagaagaaagatgggtcgtggcggttttgtgtagactatcgggccctcaataaagaaacggtccccgataagtatcccattcccgtgattgatgaattgttggatgagcttcatggggcaacacttttttcaaaactcgacttaagggccgggtatcaccagatccgggttaaggccgaagacactctcaaaacagcttttcgcactcatgaggggcattacgagtttttagtaatgccatttgggttgacaaacgcgccggcaacgtttcaatcccttatgaacgaggtcttcaaaccattcttgcgcaagtttgtcttggtatttttcgacgatatattggtctacagtagttctgccaggaacatgaggagcatttgaccttggtgttgcacaccctagcagctcataaattgtttgtgaatcagaagaaatgtgattttggcaggtcggaagtagcatatatggggcatatcatctctggtcaaggggtggctgtggatatggagaaggttcaagcgatggtggaatggccccttcctaaaaacctccgggaattacggggatttttgggccttacagggtactaccgcaaattcgtacttcactatgctcatatagccaagcctttaactgatcaactcaagagagatgcgtttgggtggtctgaggcagcaactcaagcctttgaaaagctcaagaaggcgatgatcacatcccctgttttggcaatgccggacttccaagagttgtttgtggttgagaccgacgcatccgggtatggtctgggggcagtgttaatgcaaaacaaccgacccattgccttttacagtaagttgttaggtgcccgggctcaattaaagtcgatctacgaaatggagttgatggccatctgcatggcagttcagaattggagatattatctgctgggtcgacatttcctcattcgtacagaccaacagagtttacgtcatctcactcagcagcgagaagtaagtactgccttccaacgttggatgagtaaacttatggggttcgattttgaaatacagtttaagccggggtgtgccaaccgggtagctgatgcattatcccgcaagacagtgggagaggttgaattgggtgcgctgatattaactcatggggtggactggaccgacttggagcgtgaaattgaaggcgatcctctgttgtgcaaaattaaacaagacttccacgggggtgctattactcctgtgcacttttctttggtggacaacaagctgttgttcaagggtcgatacgtgattcccagctcttcggtttttattcctaccttgctgcgagaatatcacgattctcccattggagggcattcgggggacctcaaaacatatctcaggatggctgccgactggtattggaggggcatgcgcaaggatgtggcgcggtatgtgcaacattgtagcgtgtgtcaacaacaaaaaatgtctcaacagatgccagggggggtactacaaccactccccataccttcctcggtttgggatgacttgtcaatggacttcgtggaaggcttgccatcttccaagggggtaaacaccatcctcgtggtggtcgatcgtttgtctaagtacgcccacttcctcccactacgtcatccatttactgctgtgtcggtggcaaatgtgtttgtcaaagaggtggttcgtttgcatgggtttccttcctccattgtttcagatcgggatcgaatttttatgagtgtgttttggcgggaattatttcgtttacatgacaccacactcaaacgaagtaccgcgtatcatcctcaaacggatggtcagtccgaaatcgtcaatcgagctctggagacttatttgcgttgctttgtgggggaatacccgcgctcttgggctcagtggcttgggccgaattttcatataatacttctcctcatctctctaccaaaatgaccccgtcaaggtcctttatggtagagaccctcctactgtgatacgggttaatcggggagcctcacctgttgaaagcttggaaaacatgctccaagagcgagacgcagtattagatgccttgcagattaatctgattaaagctcaacagaaaatgaagagtagtgctgatgctacaagaagagaggtgcattttaaggtgggagatcgagtgtacttaaaattacagccttaccgtcagaaatctttggcttaacgcccttatgagaagttagccgcccgtttctacggaccatttactattttacagaagattgggcaagctgcatacaagttacaacttcctgtttctagcaaggtgcatccggtgtttcatgtctcccaactgaaacaggccgttggttccattcccgtttcagccactattccagagcaattgtcttctgacttggagttagaggtggaacctgatgaactcctcgatgttcgtagtgtttctagaggccagcacacttacttggaagctctcattcagtggcagggattaccatcattcgaagctacctgggaagatgtggctgctttccatcaccattttccatccttccaccttgaggacaaggtgaaactttgggggggtggtaatgtgatgcaccaaactaccactccactactcacctattagaggcgtaagaaaaagggggtaaatcaggaatagtttacaaattctgttgaaaggaatattttgtaattatgatgtcagaggttgttagcaaaaaggcagtagagtaacaataaaaaggggaagggaggagagaagaaggtattgagatttttgtaaggaacttggcccttgggagagttgggagcctctcgaaagctcaccattatcttgtgaatattttccttcctggttatatacaagaaccttcctctgtcaatttcttttctctctaatcttatttcttattctgttttctggttgccattgtttgaagttgcttgttgtgcttgagtaaatacgtgaagtggtgaaacccatctgaattcatcacatctattccaagtggtataatacaagcttgtaatccaaatctaatgagaaatctaagttatgaagaatttcaaaagaactaagtacccttgttttggatgcccaaggatttacttgccgctcaagttaatgctcaacgtgcaagatacaacctctttagtatcccaaggtagtttccataagaattaattgagctcaaatcaagaacaatatttttatgtattaatgtgaacacttcctgaattatattagatatatggtctgaaggttggaagaaagattagcttttaattttaagtttgagatagtttttagaatcgaggaaagattagctcttaacttgtaaactaaggattgctttataagtaaaacattagttatggaactcttaaaattggttttgaacatttctagttaaaaatcccatgtaattctcccaaactagcttaaaatctcacatttcacaagctaaggagagacaaatggcgttctcttgtgaaacaatctaaaattttcattaggctactgttttcaagtatttatatgttagaagtgccgcatataggtacataaaataagtttacaaacacaagtaggaataaggaaaactaaaagagaaacttcagccatacaaaaccggctgaaatcagctactactttctactttctagcttcaaaatctgattgcaagtctcctttaagccaatcaccaatgaaaacctttcctccacatgaagtgtgctcaaatcaagagaagaaacccatcattcgcctatagctacctgggtcagatgaagatacggcaaaaaaaacgctggaaatcagtgaaccaaaataagcaccaattggatgctttctgtccttgctacattttcttctcataggactacttcaagccatacatgaataagcagttagatccagctcctagcatccatttgatcgtacaaatgagctccaaaaagataagtaaaaccaagcagccaaaacctaattaatactaatgatgaattagttgaatagctaatgacgatgaagcaacactttagtaggaatagtgttaattatgatcaatgctacttaatcttctgattaatttttggaaaaatgtcatatctaccttctgtatacacttattcataactatatcgtattattattatttttaaataactaccttttaagtaccaaaacctaagaaatcaggcacttgatggattccatccaaagatccatttggcggggcccactaactgacttttgattttttgcctttcctcttttggttaatctcaatggttcatcaataacaactcaatcttctccccatttcatcaaatcatccctaaatcagaactttttcaaattcacccaaatgaggttatggaaacctctaccaagtttattcgaccacttttagtctagctcaaagttttacacttgcttcaaaaactaagatttattaactttagaaattaggtttttatttttattttttatttaactttgtaacaatcttaaataactcaggtgctttctagagtttggctttaattgtttttcccttggttatgtgaaagaagtatgactactttctccaagactaaagtagagagcaaaaaatgcaattctggaatttcttgcaaaagaaaaggaacgagttaatgataatgaaaaacaaagaaaatgatgagaagagaggagctgaatcaatcatgatcatgtattttaaagttttttttgctattgaagtgacttaagaagaggaaagaggatgagtgaagacaaacaaaagaaaggataaatagagggaaatcttgggcttagaaaggtgaaaaggtaagaagatgagttagtgggccccaacaaatgtatctttggatataatccgtcatgccactgtttggggcttgcttaagtccatacattacttcactaattttacaaaatttattttcttgaccaagaactgaaaaaaccttcagtggtgatctattaggttttggaagttaaaaggtagttatttaaatgtttttaatataaaaggtagttatttagatatttttaatataaaaggtagttatgtgaataaaagtgtatataaaatgtaattttttgacatttttgccttagtttttcttgctaattcaccttttcaacttgaccaagttgctatgaggagaaaacgagcaattattaagcaaatcgcaacactagcattaatccatggcccatgaaactctccataattagagattggattagcacttagtagaacttcttgctcctgctccaggtttccattacttctttatctaagtgcatcaaaaggttgttgggttatgaaaggtggtggttgtgtatagtcattgtcaaaatgttgttaatgcactctatttagaggatgagggattgaatagttttcacctcgtgacctttcattcctttttaaaaaaattgataatgtgtattggtcctatgactgtatgaatggtaataagctatctcatgagctgttactatcttcctcagagtctaggtagaagggtttgggctgataattttctactatgtgcaattagtttgttggatttggatatgctagttgatataggtcctttcccttgggccttctcttaatataggcctacagtgtgattgaagataaatcttctggagaatataagaacaatgagatggattggttagaggttgatttgttcttttggtgtaagactatttcgggttctctattggttatgttcagacgccagaatatgtgttggtgattgttttccatgaacatactttatccgcagagacatttttcttttttcttcctataagattatatttgtttcctctcttggtgctcatctcagtgtctctactttacgttaaactgttgacattacttgacaatgcgtatatttgtcgcatggtgctcttccctcactccacgtcgaccccatacatcaaaaaatgccattaaagaatattcgaactcacaaccttgtgttgaaagaatggaatccctaccaatgactcattaattcattttctctttaagaaataaatgatttcctcacaaacttttaggctttaagagcccaaaagataaaaacataaaataagatagacatcaacgtcaagattagccttaaatgcacaaagcacatgtcaaatgattgataactactcacgagttgcaactctttgggcgttgcctaatattaattggatctcttttaaaaattgttggtggttatggttggtggagaggaccatgtaacttttagctggtcacaactggtaatgattgtcacttttactgcccataaaaaaatttaaactgttgaatatgtttctggcagtggatctgacaaatcctttacaagttggcgtccattttgttttgccatgtgactcaattataatacgtgagttttattatccaccaggtttggctcactaatttccggattaattcaatctaaactgtctccaaagaaggaaaagggtggaggaggaaagccttcttctaatgaaaagacacgcatacgtggttcgttttctttccagggtggaatgcaggtattagcatgtagctttcattctgttaacatttgtggttcttccagacatacatccaatgctttttttttttcttgctataaccataaacattcttgtcatgaacattctttaatactgttgctgagcttagtgtattcgttcattcatgtaatttcctctcttgaggttaaaatggcatacagccttacaacctatatccataatgctccttagagtagaatccctaggttataacatagtaccacttatcaaaataaacatggcacacactgcaggacaagaagtaaatccacctagagaactgagcacctagtagtaaaagcagcgatacattactaataacagtagcagggccataagagtagtaaatgggcctcatttcaacactccccccgtaatggtgagagagaagaagcagtctgaactcccagcttggagagcaaaatagagtgttgctgaacagggagaaccttagtgaaaacatctggcacttgatcttgagatggaacataggtaggctgaataaccccttcttcatttgtattgtccctcaggaaatgacaatctatgtctacatgcttggttttctcatgatgaactagatatgctgctatggcaagagcagcttggttatcacagtagataggagtagcactggactttttaatgcgaagatctttgaggagttgtttgatccacatcacctcacacacagcaagagccatggatctgtactctgcactgaccacaagaaattgcctctttgactttcaagatacggggggagtcaccaaggagcacacaaaaccagatgtagaatttacaacacccatcccattcactatcacaaaatgctgttagttgagcactagacttgttcgccatgagaattcaccctgttggcagcttgaagatgcacattagtggggcagtgcataaatttgcttaaatcatgtatagtgaaggcaatatcaggcattgccttgtaatagtgagataaatgagcttccccatcaatttttgatacacatcaggttgttgaagaggatcaccattgtcagcatagagcttgacatgtgagtccatacgaagcctcaatcgtctgcaatttataaaaccatattcatcaacaagacccatcacatacttctttagagataaaaacgatacttcactacactgatccacttcaatcctcaaaaaatatcttaggccacccatatctttcatgtgaaattggccagcgaagaaactctttgcttcctcaatagttgctaaactattgccagcaagaatgaggtcgtccacatacaccaatatagcactgaaacagtgagagttttgcttgaagaatagagagtagtcacacttggattaagtgaatacattttgctttaaagcagtgttagcttggcaaaccattgcctcaaagcctacttcaagccataaagtgacttaagcagcttgcacaccttagttcatttggtgtcacttctgccatcagtacttagctccccctctccttgaactttgatcctgttacatgtttcactatatcctggtgatagcttcatgtatacactatcctacaattcaccatgcaaaaaagcatttttaacatccatttgtttgcaagaaccaaccctctaaggatgcaacaacaagcatgtggtcatctttgctacaggggtaaaagtctgctcataatctattccatatctctgtctgtcacccatgattacaagccttggcttatgcctattatttgtgccatcagtgctgtattttgttctgatccatccatgtgagggatggctcatttctacaaaatcctagttccgttaggatttgtgttgttttcctaattctagtaggaataggactcctaaaatcctaatcctcctagttctgttaggagtttaaaagttttagtttgattgtaattctagttgtgttagaaatccaaatcctagattcatgtcacgtatggttagaacatggctagtaggataatttgtcttgtgatgtccatagccttggcatttgtggcacctaactttcaatagcttgtcttctgtctccttttctttctccttctttgaggaatcaacgtttttagagctatctaaaccactagcatcaatattaggtttaaaagtgctaaaagatttcgaatagttcttacttgcatacaatttctttttctagtttatgtagcgtcaccagggaacaaaaactcggccgttccgttctggaacggccgctttgtaacggatttcagagaggccgttccgttaaataccgttctagaacggtgatttggaattcacaccaaactcggcgcgatagcgttacgtaacggtgtaacggcgttccagaaccgttacaatcacataacgtccgttatttgaagaagaccagttcttttggtggaggaagaagaagagccaacgcaagatctatagatctgagttaaaatttgaaaataaaacatgtttttttatttaaattaaagcttacagaggatgtagaactcaaattcgagtaaacccctcctttaatttcattaggttactgcaaatcgaaccctaaattgcaaaccctaatttcgaaaaaaccctaatatgcattgggatgcaacgctgcttctccggtcatggcagagaaggtcgacgagtcatcttcggctgcttttagcactgtagctgccggtggttggcttgtttgcaggttagtgcttgctggttttctttctctcataccgatcatcttcttcttttctctcttctctttttcttttttattgtgtgactgccagtcacgtgataattgcaactcataaagtatctctttctctctcttcttttcatccctttttatttttctttcccttttagtttttattccctcacgtggaatcacctaattttcatccttttttatttttttagttacactcttacacagaagtatgttcaaatatcattatagtacctcaaatattgtatttataagagttttggacataatatgatatagaaagtaaaatagaagaaaaataaagtttaaatgtcacttgtgtgatttttttaaaaaaattcacgccgcgacggccgcgaaacgttctatttcccgttacaagccgttcccgcgataacgcgaccgttcccgcgaacgcgaccgcgaccgcgttttttttccttgagcgtcacatcttgcaagcttcttcaaaggtgagttatgtgtacaactccaatttctctccaatcccctccgtcctcatttaggcctccaaggaagctacttaaacattgatcttcaagttcatcaattttccaaagaatggataacttctcgaactcctttatgtaatcttcaacggacatattcccttgtttaagagtagaccattccatgtacaagctttgtttgtagttagaaggaacaaaacgtcctcttaacaactttttaagcttatcccaagtagagattttgggtttattagctttcacacgctgcctctttactccatccaaccaaatagatgcatatttggttaccttaagcacggccaccttgtatttcttttcttttggtgtctcttaatcccaagtagagcttttgcgtgtgaaagctaataaacacaaaatctctacttgggataatcttcttcttgtttccgaaacaactaattcttatggtagttaggaaagcaagaatggtttctaattcaatagggaatatattaattattattagtttaagttaaatagtgcacgaatctaaatagattattcgtctcaaaatctcacttaagtatagatttgtttggacatctgagggaagaagaagagagcgagataaaggagaattatcactcaatgaatccatatcccgagttttcccatttacttctttgaaagcaatatagttcacgaggtcttattatcagtctatggacataagagtaataatttaagggcaaaaactatgactttatgggtttaaactgatacatgttctgttaaactgatagatgttctgtgttaaaccgatactcatatattcctggttaaactgatagatatatgatttaaattgatacccgtctcagtcatgtcttggattgagacggtctgacacaagactttttgtgtattatatatctgattagaataaatttatcctgtttactaattattttatcttctccagacacttgttgacacaatatgcaatcagtttggtaaagatgaactcaaactacagtgcaaggtcctttcattgtcctacagtcataaggggatcccttcttcagaaaattgggtcgtgtcttctgtgtcaaaaaattccattgaagatcaacaatatgatgctgtcatcgttaccgtgagttttactttgcttactgctattgcaccaatctttcttcttttgacacactgataatggcaatgctgttgtggtttgaagccatgttatggggttttagggatatttatggagtctgatctaatatgttattggataaaattcagatctgtaacgtgactcaatgagattgaaaaaaattgaatcaagataatggattggaaaattaggagctaacctagggtctataagcgatccacttggagtctcataccaagcaggtattcgacattttaggtttatattgctgctatggctcatatgggagcctacatagggtctggtgcttattcctttttcttttgtctagttttggggctgcacatttctgttgtgttttgatatggatagccatcacctgcaattgcatggaggctgaactaagttctataggggagcaaacagtatctgttggaaatttattttcatattgtgtttttaaatgctataatccaaaatttgttgttcccctaaaatgcctaaaatacccttatgtaactgctccatctgtcccttaatagacttcccatttctccaatgcatgtttgccaatacacattttgtattgttaatatcaaaaattacatattagtaaaaattataaaagtttgattttcctaatgtacgcaatgagacgaatcaaacaagacgccatatgactatgttttttcttatacttcctatgttttttaataagtgacatgttttccttttagggaaatgtcacaataagtgacacatagctcaaagtagtaaaaatacttctcatttattacatctttgccattatttaattgtttcacctacctactttatccaatactcaaatttgattggttgaacaattggtcccaactttctctagactccttggtattccctttcccccactttctctctgtgtcacttattaaaaaatggaggacgtatattggaaaaaaattggaaggttttcttcacttatgaatagtggtaaaattagagatgggaaggctattttgggatggatggagtaatatttaaatttttaaaataatgtcattgttttagtgatgaaataaaattcaaggctattttttctagtaattatgttatctgtacatcaccacacgtatcgcgtgcatataagactagtttgatgatattccaacactgttcgaaggaagtcaggcatggaaccatgtttgcttccatatgggaaatattttgcttactctccttcaaacatctacctcattatcccagaatgattgatcgaatctaatacaaatatacaattgatcatatgccaccagggaattacatcaaattaaatttttatagaaggggaatcagtcatagcctcatagggaacgaataagtgatactcgccagtttctttcctggttacttttcctcttctcactagccatcctttatgtatgggtatgctgcatcattcctgccactggttgggactcccgtttgaactatggggggatgggaaagctaagccatcatcttcaaattgagtttcttgagaatgtaagacaccatctgtaagatgaatatagtgcactctatagtcaatgtcatgatctttatgggtttatctgctgaaataactgtgatatacccagctctccatttacaaagttttcctacatattaaactcttgcccgcaattctagaacttcattgtagaacttttcctacataagcatcatttgtcttttctgtagtaaaagttagaaagagctttattttagaacattcgtttttagttttctttgttgttgattactccgccacttttaatacttttatgattcaagtatttgacaaaatcatgtaatttaggtcctctgctgcatgcagtctataccctctctctctctctctctctctctctctctgtggttgtgtcttacttgttgagttactaactccagccattacataaagtaggctggcattatgatgagcaaattactcaagaccacatgttagctcctttttcttttctccttattctgaaaggcaaatataggtccatcttggtgcttctcatgtcataagtaagctgaccccctccttttccagggaataggacaataatccaaaagtgagggttttacatgttgggatttgtgaagtttcttattttacttaatagccgagtcagtgttacaatacatagtaccgtgttacaaaatagtatgtaacaccaagcatgtttatgtgcaaaattgtgcaagactttgttgctggcacgccaagggctgttttaatgtagtttacttattcttttaggtttttcagatgacaatcataaagggaattaggagtgtttttattgtagtcaatccctattgtgctacaacgataaaagaaaaaagcacaagactagaaggagaagtaatgtctaggaaagactcctcacctggggttgctagtcacctacacatcttagaaggcatcaaaccaaagcttattcccctcgactgttttcgggagaaaagaagacaaaattgtttctaacttatactttaccagtttcactacagcatcagaaagaagcaaaatatgctcccacaacacggcgaacctagctttccagatgtgataaaccagaccagcaaaatgattattttcactagagctttgagtctattttttcggtttttccccttcttcctggtaatgtcacgccaccaagccatcatctcaattttttgagatttgacgtaatcgctcaaatagctgagtaagacacttcttgctctaaatactaataaaaaagaggtgaatgtgggtctcagccatgttactcaaatcggataaagtgtctactcttattagggtttttgggtgttggactcatccatttttttttgtaaaatgtcaagattttggtttgaaatgagagattcaagtgtcgtgacatgagtcggcacgcaacacttaaacgtgtcgaagtaacagagggtctcagacaatcaactttaatcaatcacgaaccccaaaatttatgcaacctttgctcatattcagtctctgtaaagcactcaactgcagcacacccacccattcgcttcacctacagcaggagggcacccaagtaattgctatgatgagcgaattattctgttttgccttgctggaatattgctgttagatttgctgactcactggcagttaattatagtcagagaatgagaaatatcctgtagagagagaaagggtatcttttgtatttagctctataaatagctaaggaagggaagggcattgagagtttatgatattataataggagagatttagcctctcgaatgctgataggagcgtagctcttgttggattatcaatactactctgtttgctctatctatttctactcaggttccttcttgtacagtggatccctgattggatttacttcatcaaccagcagataaaattatttgtaggcacattgaaaccattccaaacctaatgaggccaaagtttatcacaaagaatataggagccaaatgtaggcaacagataagagtataattgccagaagttgaagactccaggtattgttcagaaaccttaatgcatatcatcattctgacactagattttccccggagccaactaacaaaaatgaattaaagagattaaggctatgtttagttcacctgaaattttctgatctgaacttatctgatctgatctgaacttattttttctgatctgatctgatctgatctgaaccaatctgattacaagatcttatcttttagatttttctcaatatataagaaaaaatatagtcatgtggggtcttgtttgattcgtctcaatgagtactttattaatattcaattattataatttttactaatatgtaatgaaagatataatgatttttaaatataagcatgatctgaactgatctgatgtgaacttattttttctgatctgatctgatctgattagatctgaaataagcaaaaataaggtgaactgaacatagcctaagcaacaattgagggaaaataagatcattatggctaagataagataaatatgtaatgataaaatcagagtaattatatcagttacactctcaacattcgtcagattgaggtttcctcccaaaatgccaacccacttttctgtattttcacgtccttctctctacccttctaggtatatattacatcagctgtaaaatttttgaaccaactagtagaatactgatctaccctcaactgcctcactttctcattttttctgggcctttttctctctagcacaagtccacataagtgatgcatagcagaaatataattccactagtcatcctcaatattgatataacaaacacatcacccacatattatcatttttaatcgctgcatgcgaggcatacttacccaccaatcaggatatgcataacagcgttcctaattccaaaaccaccatatatcttgggtttgcaactctcatccctagcaacaaggggactttctgaaaaagtggcagattccgcccacaagtagtttgtacggacacctttattatattattaatatcatatttcggcaacacaaattaccagcccagtaaaacatgaattgacatgagactaacaaggggcccaatctaatatcgtacgtctgtactaagcaatgtataaaaaaaagctcaaggtgcattgatgcaatagggatcctaatgtgcataggtgcgcctcattgaagtgaggcaccactaaggataaataaaaaagattgatgtaaaattaaattgtgcaccttgggtgcgcctcgatgaactttttttgtgtgcctaagtgtacctcaagtacgcctcattgatatcgcctcgcctggcagaaaacgagcttgaccccaatcgccttgctccccaccgcctaggcgtgcctcagtcacactttttaaatacattggtattaagtactcagaatggcaaaaagaaactttgggcattaattagacatttcactttttgtgcaactatttgtgacttcagagattgatatgttttctacattacagacttttgtgatggctgcatggtctccactgtcaaagaacattagtttaagtagaagaaatattgctctattaccttcctccctctacaaacaaaatcctaaaatgtggttatgtagtgccaattcaaacttgtagatgcatgactaatgctttcattatgctgtgggtttttatactatgattcatgtccaattacataacaattagctggagtcaggatatgtcacggaaattttaagcctggcaggatgattgtttatattttctctttttcggtgtttaagtcaaagtaaacttctaggctgctcttttataggctagttgggctgttggggagatctacacattaagtgtgaagaaatcttgtctaactccagtttggttgagaactgtaagctgtcataacatttgttgcatgatgaggccttgtgggattatcatgttagctgtaaactctaaacttacttgaaatctagtgttgtgtctccttatttctgtagtcaaaattgaaccttctgtacgtttttgatacctgcgactagaatgatggaattctgaattactgatactattacaaccatctgctaagaacgaagatgactcttagctaatttctcagcagatttagagaaattaagaagaattactaatgaatatttaaagagaaaactaccaagatatgattgtattgatgaaaaacaccaattacaacctaaccaacattcgagaggttggagctctcccaagtaaccatttctctcactaaacttatcaattttcaagatgccttttccattctcagttcctctatatttatactactccccttagcaaactacccaacttattccccaagtaaactaaagagataatatctaaaatacccttccccctacaataatattagttcttagcattaccggccccctaaacttccaccttgtcctcaaggtgggtcgtaatcatcactaaattctgggcctctactcgtatattcagtgtcttgcagcccttcaggccccaagcctaggttatgcagctcgtgttgcggctcctcctcatatagttctctggctggagtgagtgcctcaactataatgaaaaagtcctggaggtggggaaggaaggagtgtctgaaatggtgtggtgtgctgctggtgttatgggcttgtgcctgaaagttttgggtttaaagagatggagtggagaagagtggagaagtgactggagacgtaaaagaaggaatcataatttttgtaagtggtgggttgaaaaagttggtgggaagaattgtttttataaaatgtagtgtaatggtcgaaaaatgggtggagtaagtatggtttttggctggggatgtggtactgggttgaaaataaataggtctgagcttacttgtaaaattggcctcaacatgagcaggcccaatatcttgagccaattccccaaaagctggcaatagagcactcttaattgcattgttgtgggccatcgggctccaaacatatattcggaggagccggacttctttggtgatgtcattagcttggcccattgcacactttcccttaacagcctcaagatcttttcccacttttgtaccccaaccacgtggcttcaccatcctttctttcttgcttttgtcacttttttggcaatatacgagtttgtccttactaccctcatcttctaatgttggcttcctcaccaagcttaatttctggaattttgtccaccaaatcccaccacccatcgtcaacaccatacctatctacaccggccaagaagcctggtcctccacccgaattttcgccacagacaaagcctgaacaaccgtcagttctctcaccggagaagttcacaggtccaccacctgacccactagttgctgatccacccttcacaaatctccctcctctggctgccacaagtagtggttcctccgtaatactcatatttctcgtccaagagccctggaccaccaccggacccacttccaccggcaccaacttgttcaaatgatacttctctttcttttccaaacagcctacttggactggaaaaaccactgcgattgtagcctccgccagatctgtagcctagtgcacctaacgtgcttccaactgcaacccaatagggatggaaatggatgggattcggggagggtggagcatcacccgcatccgtcacccgcatccattcgctccacccgctccacccgcatccatccatccgtcacccacgggtgaaacgggtgggtcggtgataaacgggtggaaccatttagggggtgtttggtatcatgtttttttacaaaagaaacagaatcaagtaacaaaatccgtttctacttgtttggttctatgttgctcagactcgagtacccatgtccgacacgggtacgtgtccaagtgtccaactcagctattttctagaattttttatattttttaacccaaaacaaagtgtccaagtgtcccacccatgtccgactcccgaggatccgacacgggtacttgaggtgaaatgaagagtccgagcaacggaggtttggttagtgtgtaaagtaacaattaccgttacttgaggaaaacacatccccccaagttgtttccattcaaaaacctaaggaaacaaataacgtttcactcctcaaacaagaggaaagggaatgggttatatttatttccattccattaggataccaaacaactaataagggtaacacttattattatcctttcccctccttatcaaaatcctttccattccgtttacggtattcataccaaacacccccttagtatattttctaatgaaatttgtgatatgatatgcatgatataaaataattctatcaaaaatataaaaagtaagtaaacttacatgtacaacttaatagatgggtgatgggttggaggttaaacgagtgatggatcgggtgacgggtgaagaaattctcacccaccactcgctttccatccatttaaattaggtttttcatccatttaaaaaaccgggttaaacaggtgatgtatgatccatcacccatttccatcctcaaacacatcccgatttgtttactgcaccaccagatccaccagtataaccacccgaaaaatcatcatgccttctactagccttgtaacctgctcccggtgagaagcttcttccacaagtggtggtcgctggacctccatctccttcttccccaaaaaattttccatgacacccactcgacccttcatctgtgacaacctcttcttcgtccacctctgaagttttggggtcgtcttcctcctcaagctcctcttgaagtaactttaacttccgttggatgggagagaacgcttcattgattatcttcaccagatcttcttgaagtttctcgaaactttttctcacgttttcctctacctctttcgtgatttcctttccgatctccttcatttttagactaggagctcttgcgattccatggcagatttctttttttaaaacaagaaaatcaggcacttaatctcccagaatagtggtgctctgataccattttctaagaaccaagatgactcttagctaatttctcagcataacaacaaatttagagaaattaagaagaattactaatgaatatttaaagagaaaactactaagatatgattgtattgatgaaaaacaccgattacaacctaaccaagaggttggagctctcccaagtaaccatttctctcactaaacttatcaattttcaagatgccgtttactactccccttagcaaactacccaacttattccccaataaactaaagagataatatctaaaatacccttccccctacaatattagttcttagcaccatcaaactgggatggatggttttgtaaggttccaatttacttctccatcaaaatattttaggattttttatctcatgtattttagagtttcctcgtccctttttatctgataagattcttctgatgatttgattttatggtaggctccaatcagcaatattaaagaactgaagattctgaaagctggagttccattttcacttgacttcattccagaggtttgtatttttatagtggttagacatgcttcccctagttttcaaagtaaaagcatccttgttgtgacgatattttttcccttgtttttgtttttattattatcatcacttatttccattttctattttccatgctgataagatgttcatcaccataatcttgtggtatcagaagtgtttagtggagtttattcactacacatgcagttgttcttttgccatgaccgccattcattttctcgtcaaaacaaatctatgaagtttggttttcagactcatggttcttgtagctcttgtgaatttttttttcttctccttgcatgcattcttcaaattacatattgcatataccaggtgctctcctttattttatatttaatttttaaaattctatcatatattttttaatgtcaaacctcaaactaggggttcactgcatcttaggcttaccaggctaatatttctttacttaaccttttccctttatatttgctatcctcttgtgtagtaatcaccataagaagggtacaaactaaattaccctcccattcttttgtatcattctgaaatagtgtcacagagctttgatttttttgccctcatttaatctggcaaatgttctctctatttttttttttttactttcttttgacgggattctcaggcaattgttacggggagcagccagtcacactgtttctgtttattatgcaggtgagttacctgcccctctctgttatgattactgcgtttaagaagaccagcgttacaagacctcttgagggcttcggagttcttatcccttcgaatgagcaacataatggactgaagactctcggtaattgtctggttcacgtgtgtagcgaatcagattttcaaaccctgatttcgtaacattgcaggtactctgttttcatctatgatgtttccagatcgtgcattgtcagacatgtatctctatactaccgttgttggaggaagcagaaatagagaacttgcaaaagcttcaacgtatgagatatgcaatgttttaaatgtatgctatagtcatcgtttcaaccttttggtgcctttttcttactaatttatcctcctggtttaatgatcttagggatgaattggagcaaatagtttcgtctgatctccaccagctgttgggcactgagggaaaacctacttttgtgaagtattgatatctttcacccaacttaacatgatttgtgcttataatatgttaaataaagtaactgaaatcctgaaattaagactacgaaactgtatggtgacagtcatttttactggaacaatgcattccctttatatgggcacaattacgactcagttctgagagcaatagaaaagatggaaagagatcttcctggacttttttacgcaggtaatctgtcatttgcttgttgcgataaagttcatgtacagttggcatatcaatcaacttgcattctttcttgctaactccaaacaatcaggatcattaacttgtaggctgcagcaacagagagtatctcccaagttgttaggtttcatgtaacctcgtcgctgagatgaaatttccgttggctaaaaagtgaaagttttgtattgatgttacccaaaacaaaagtattttgcatgttgcttgaagttttggttgtttcagatagtacatcctttgacatgaaaataaatggaaaagcgtatgtcaagcaattatcatctagtttctttgtttctagatactagccgcatttgatcccagatcatttttgaggaagtcagctgaaataccgtagctatccttcagttttcataataaaactttaatggatctgatgtacagtaatttagtgtgcaccgggttaataattgatattaacttcatatagtgagtcttataaagatataatgaacttatatacaatatagtggattttattaatggaaaacatatagtgaaactatatgcaatatagtatgatacataaagacttagacaacaagagcattcgaaattacaaagaacaaaggaaagaacaattgtatcaaaccggttcgaatgaacaaacaaccaccacttccacaatcaatgtaccaccaatcaagactaaactataacaatgagcttctagtttaagtctactttgagttttaatcaccaattcaacgattagatgatcaaaattgcaaaggttaagagttggtcaaacctaaccaagagttacactaggcacatagctttgttaggagtatattagtttatgaattctagttaagttagaaatccaatacctagttggattaggattcctaattggattagaattatagtttagttagaattctagtaatagtaggcgtgtgattaggagatataattagcttaattcttatattgttagtttaattcttatcctcgttttaggtttatctttagtcgaacttgtaccctatataaggggcctttatttcattaataatatagtttattttgagtttaaacctttacttgtgattgtttgcttgagaggttattaatcgaaccattaataacttttcaggattgttaagtttttagtgttaaacatcttaatttcaggagtgattttaagagtgtttagattcttgtattcaagtttcaggactgatcttgaatcaagaaatatccctagtttcgactaatatcataagtagttcgaattcttggagtcttttcttcaagattcatattcataacttgattatttagacttcttggttttgtaatcatatcaagtggtatcagttttccagggaggagaggatacaaagggttctctttgatcaaagaagatccaagggcatcaataagaatgacacttgcaataagttcgagtgatacaaacaacttcaagactcgatcttttgctaccaagaaccaatcttgacgcctgaagattgttaggacaaaggataagaagtgtttctacatccaagattgcattctttacgtccaagattgcgtcaagatccattctttaagttcaagaaaggagtagaaagcattcgaacactacttaaacatgacatccgagatggataagctggctatggccatgagtgccttggcacaatcacaaactgagtcacgcaaccacatgggtaggatggaggcacgtgaccgtggattgaaactagatgactatagtggagatggcaatccagaagacttgttggagtggatttgccaactaggcaaagtgagtgattataggggctttgatcacaagaagagattcaaggttgcttccattaggctcacgaagtatgctggaatacggctcgaaggattgcatgcacaaacttcttgcctaatgactatgaacaaaaacagttcataaggctcgcatcaataagccaaaacacacttagtgtacacgaatacagcatggagtttgacaaattagggcttatatgtgacatagaagagaaagagcaatacaagattgcaatgtacattaaagggttgaatcgatatatagccaagaagatcgaagtctcaacttatcacttctttgaggatgtgactaaattggctaagaaattcgaagagcatgacaaagaagaagggcctaagagttcttacacacctaagtatgactctagtgctaaagggaaatcaacagttccctactcaaggtggtcggaaagacctaagaaccccactacacctaaggaggacactagcatggagaagacaaaagtggccgtacctaaggagagtttaattttgtgttttatacatctttgcttaagagcttaacaattgaaactattaataacttttcaggatggttaagtttttagtgttaaacatcttaatttcaggagtgattttaagagtatttagattcttgtattcaagtttcaggagtgatcttgaatcaagaaatatccccttgttcaactattataattgatcttattcgagttcttggagttaatttcttcaagattcatattcatacttgattattagacttcttggtttagtaatcatatcaatatcattagcattaatttacccccagggagattaagaaaggattagcctaatcaaggcgcttaagaagtttttaggaaaaatcgtgcttgttaagcttaagaattgaacttctttcaccatttgcccttgattctcttgttgaactagaagatcttggttcatagtagatgctcctgcatcatagtagagcatttaattttaattttttaacatgcacgaagatgtaggtagtgtagtatatatcgtgagacgtggtttaacatatagaaagatgtagtttctgcatgatatagtgagtttttgcatgatatagtgaatgtctgaatgatacagtggatcgttccgaattgttgtagtttgtatgatatagtatttttgtgaatgatatagtgagtttcttcatgatacaatgggtttctgaatgatatagtggattgcttagaaatgatatagtgagcttttgtatcatgtagtaggtttctatgtgatataggttgttaaaagatgatacatgcttttggcctcatgtactctaatgttaacgtgaacccggtccttgcaagtcaattgcagttttttcaatattaagctatttttttttttttttttttttttttttttttttttttgtacgggaatatttagcatctttaccacaaacataaccatacgaatattatgcggaaattccagtctgaagtcttaacttttcaaaattaaaagcttctatattatttttggaatgaaaaaaaatgagctatggcatgttattttgaaatacaatgagtctcaaggtgcatagtggcttcaattctacgaataatgaatggactactgatttctaattttttgttccgggcttttgcattaggtaaccataaagatggactctctgtgggaagaactatttcctctggatacaaagctgcggagcttgtgatatcctatctcaactctacttaagatgcctaaatgatcgaggagactccgtaagtcctttctctgattctatctttgaactgagtggaaacacgactgtggtctaaagtagttgatgtctcagatatccagaaatggcgttagtgatattcaggagctgtccattgaccctttgattcattgttgcagtttactgaaagttgttagctggtctcagaaaaacgaaaggaaaaaagggggaaaacaaaaacaaagaaacgtagattgtggtgttaaaatcaagaattccagagatttgtaccttctttatcagttgaattgtttacagtgtgaatcaagaagttagctcgaccttcttttcttgtgaatggtaagatttcgtgatcatcaatacttgattgtgctgtttgcaacttcaacggtaagatttcctgatcttacagtttaattgcttgtgctgtttgccactt

SEQ ID NO: 108 - DNA, 1575 bp, synthetic construct
  source 1..1575: mol_type = other DNA
atggtaatgctatacgattctcacctctcaggagtctcaactcatcttcaactatcgcaggcatttcccaggaagaacccattaatggccaaagtgtctgagccgggtaaacccacttctgctaaaaggattgctgttgttggtgctggtgttagtggacttgctgccgcatataagctaaagtcccatggcttgagtgtgacattgtttgaagctgatactagagctggaggaaaactcaaaactgttgcaaaggatggtttgatttgggatgagggggcaaatactatgatagagagtgaagcggaggtcacgagtttactcgatgatcttgggcttcgtgagaagcagcagtttccaattgcacaaaacaaaagatacattgcgagagacggtcgtcctgtgctgataccttcgagtcccattgcacttctcaagagcaatatcctttcagcgcaatctaagctacaacttatgttggagccattcctttggagaaaacgctatgcttctaagatttctgatgagcatgctcaggaaagtgtgggtgagttttttgagcgacattttgggaaagagtttgttgattatctaattgatccttttgtcgcgggtacaagtggaggagatcctcagtctctttctatgcgtcatgcatttccagaagtatggaatattgagaacaagtttggctcactaatttccggattaattcaatctaaactgtctccaaagaaggaaaagggtggaggaggaaagccttcttctaatgaaaagacacgcatacgtggttcgttttctttccagggtggaatgcagacacttgttgacacaatatgcaatcagtttggtaaagatgaactcaaactacagtgcaaggtcctttcattgtcctacagtcataaggggatcccttcttcagaaaattgggtcgtgtcttctgtgtcaaaaaattccattgaagatcaacaatatgatgctgtcatcgttaccgctccaatcagcaatattaaagaactgaagattctgaaagctggagttccattttcacttgacttcattccagaggtgagttacctgcccctctctgttatgattactgcgtttaagaagaccagcgttacaagacctcttgagggcttcggagttcttatcccttcgaatgagcaacataatggactgaagactctcggtactctgttttcatctatgatgtttccagatcgtgcattgtctgacatgtatctctatactaccgttgttggaggaagcagaaatagagaacttgcaaaagcttcaacggatgaattggagcaaatagtttcgtctgatctccaccagctgttgggcactgagggaaaacctacttttgtgaatcatttttactggaacaatgcattccctttatatgggcacaattacgactcagttctgagagcaatagaaaagatggaaagagatcttcctggacttttttacgcaggtaaccataaagatggactctctgtgggaagaactatttcctctggatacaaagctgcggagcttgtgatatcctatctcaactctacttaa

SEQ ID NO: 109 - DNA, 45 bp, synthetic construct
  source 1..45: mol_type = other DNA
gaaggtgaccaagttcatgctcatagccaatcgcgcagaacaaat

SEQ ID NO: 110 - DNA, 49 bp, synthetic construct; identical to SEQ ID NO: 84
  source 1..49: mol_type = other DNA

SEQ ID NO: 111 - DNA, 25 bp, synthetic construct
  source 1..25: mol_type = other DNA
catgtttccaggctccagagttgaa
